(19) United States
(12) Patent Application Publication
(10) Pub. No.: US 2026/0102520 A1
(43) Pub. Date: Apr. 16, 2026

(54) CRISPR AND AAV STRATEGIES FOR X-LINKED JUVENILE RETINOSCHISIS THERAPY

(71) Applicant: Regeneron Pharmaceuticals, Inc., Tarrytown, NY (US)

(72) Inventors: Charleen Hunt, Montvale, NJ (US); Yang Liu, Valhalla, NY (US); Guochun Gong, Pleasantville, NY (US); Carmelo Romano, Tarrytown, NY (US); Brian Zambrowicz, Sleepy Hollow, NY (US)

(73) Assignee: Regeneron Pharmaceuticals, Inc., Tarrytown, NY (US)

(21) Appl. No.: 19/412,198

(22) Filed: Dec. 8, 2025

Related U.S. Application Data
(63) Continuation of application No. 17/774,284, now Pat. No. 12,521,451.
(60) Provisional application No. 62/932,608, filed on Nov. 8, 2019.

(51) Int. Cl. A61K 48/00; A61P 27/02; C07K 14/705; C12N 9/22; C12N 15/11; C12N 15/86; C12N 15/90

(52) U.S. Cl. CPC A61K 48/0058; A61P 27/02; C07K 14/7056; C12N 9/22; C12N 15/11; C12N 15/86; C12N 15/907; C12N 2310/20; C12N 2750/14143

(57) ABSTRACT

Nucleic acid constructs and compositions that allow insertion and/or expression of a retinoschisin coding sequence are provided. Nuclease agents targeting RSI loci are provided. Compositions and methods of using such constructs for integration into a target genomic locus and/or expression in a cell are also provided. Methods of treating X-linked juvenile retinoschisis using the nucleic acid constructs and compositions are also provided.

### CROSS REFERENCE TO RELATED APPLICATIONS

[0001] This application is a continuation of U.S. application Ser. No. 17/774,284, filed May 4, 2022, which is a 35 U.S.C. § 371 national stage of International Application No. PCT/US2020/059568, filed Nov. 7, 2020, which claims the benefit of U.S. Application No. 62/932,608, filed Nov. 8, 2019, each of which is herein incorporated by reference in its entirety for all purposes.

### REFERENCE TO A SEQUENCE LISTING SUBMITTED AS AN XML FILE

[0002] The Sequence Listing written in file 641782SEQLIST.xml is 5,590,722 bytes, was created on Dec. 8, 2025, and is hereby incorporated by reference in its entirety.

### BACKGROUND

[0003] The RS1 gene encodes a highly conserved extracellular protein involved in the cellular organization of the retina. It is assembled and secreted from photoreceptors and bipolar cells as a homo-oligomeric protein complex. Over 200 mutations have been detected in RS1, many leading to early onset of macular degeneration due to a non-functional protein or the absence of protein secretion. Lack of functional Rs1 expression causes schisis within the retinal layers leading to the early and progressive vision loss associated with X-linked juvenile retinoschisis (XLRS). Although there have been gene therapy clinical trials for XLRS, the trials did not meet their endpoints. New strategies are needed for treating XLRS.

### SUMMARY

[0004] Nucleic acid constructs and compositions that allow insertion of a retinoschisin coding sequence into a target genomic locus such as an endogenous RS1 locus and/or expression of the retinoschisin coding sequence are provided. The nucleic acid constructs and compositions can be used in methods for integration into a target genomic locus and/or expression in a cell or in methods of treating X-linked juvenile retinoschisis.

[0005] In one aspect, provided are bidirectional nucleic acid constructs for integration into a target genomic locus. Some such nucleic acid constructs comprise: (a) a first segment comprising a first coding sequence for a first retinoschisin protein or fragment thereof, and (b) a second segment comprising a reverse complement of a second coding sequence for a second retinoschisin protein or fragment thereof. In some such constructs, the second segment is located 3′ (i.e., downstream) of the first segment.

[0006] In some such constructs, the first retinoschisin protein or fragment thereof is a human retinoschisin protein or fragment thereof, the second retinoschisin protein or fragment thereof is a human retinoschisin protein or fragment thereof, or both the first retinoschisin protein or fragment thereof and the second retinoschisin protein or fragment thereof are a human retinoschisin protein or fragment thereof. In some such constructs, the first coding sequence comprises, consists essentially of, or consists of complementary DNA (cDNA), the second coding sequence comprises, consists essentially of, or consists of cDNA, or both the first coding sequence and the second coding sequence comprise, consist essentially of, or consist of cDNA. In some such constructs, the first coding sequence comprises, consists essentially of, or consists of exons 2-6 of human RS1 or degenerate variants thereof, the second coding sequence comprises, consists essentially of, or consists of exons 2-6 of human RS1 or degenerate variants thereof, or both the first coding sequence and the second coding sequence comprise, consist essentially of, or consist of exons 2-6 of human RS1 or degenerate variants thereof.

[0007] In some such constructs, the first segment comprises a fragment or portion of the first intron of human RS1 located 5′ (i.e., upstream) of the first coding sequence, and/or the second segment comprises a reverse complement of a fragment or portion of the second intron of human RS1 located 3′ (i.e., downstream) of the reverse complement of the second coding sequence.

[0008] In some such constructs, the first retinoschisin protein or fragment thereof is identical to the second retinoschisin protein or fragment thereof. In some such constructs, the second coding sequence adopts a different codon usage from the codon usage of the first coding sequence. In some such constructs, the second segment has at least about 30%, at least about 35%, at least about 40%, at least about 45%, at least about 50%, at least about 55%, at least about 60%, at least about 65%, at least about 70%, at least about 75%, at least about 80%, at least about 85%, at least about 90%, at least about 95%, at least about 97%, or at least about 99% complementarity to the first segment. In some such constructs, the second segment has less than about 30%, less than about 35%, less than about 40%, less than about 45%, less than about 50%, less than about 55%, less than about 60%, less than about 65%, less than about 70%, less than about 75%, less than about 80%, less than about 85%, less than about 90%, less than about 95%, less than about 97%, or less than about 99% complementarity to the first segment. In some such constructs, the reverse complement of the second coding sequence is: (a) not substantially complementary to the first coding sequence; (b) not substantially complementary to a fragment of the first coding sequence; (c) highly complementary to the first coding sequence; (d) highly complementary to the fragment of the first coding sequence; (e) at least about 60%, at least about 70%, at least about 80%, or at least about 90% identical to the reverse complement of the first coding sequence; (f) about 50% to about 80% identical to the reverse complement of the first coding sequence; or (g) about 60% to about 100% identical to the reverse complement of the first coding sequence.

[0009] In some such constructs, the first segment is linked to the second segment by a linker. Optionally, the linker is about 5 to about 2000 nucleotides in length.

[0010] In some such constructs, the first segment comprises a first polyadenylation signal sequence located 3′ of the first coding sequence, and the second segment comprises a reverse complement of a second polyadenylation signal sequence located 5′ of the reverse complement of the second coding sequence. Optionally, the first polyadenylation signal sequence is different from the second polyadenylation signal sequence.

[0011] In some such constructs, the nucleic acid construct does not comprise a promoter that drives expression of the first retinoschisin protein or fragment thereof or the second retinoschisin protein or fragment thereof. In some such constructs, the first segment comprises a first splice acceptor site located 5′ of the first coding sequence, and the second segment comprises a reverse complement of a second splice acceptor site located 3′ of the reverse complement of the second coding sequence. Optionally, the first splice acceptor site is from an RS1 gene, the second splice acceptor site is from an RS1 gene, or both the first splice acceptor site and the second splice acceptor site are from an RS1 gene. Optionally, the first splice acceptor site is from intron 1 of human RS1, the second splice acceptor site is from intron 1 of human RS1, or both the first acceptor site and the second splice acceptor site are from intron 1 of human RS1.

[0012] In some such constructs, the nucleic acid construct does not comprise a homology arm. In some such constructs, the nucleic acid construct comprises homology arms. In some such constructs, the nucleic acid construct is single-stranded. In some such constructs, the nucleic acid construct is double-stranded. In some such constructs, the nucleic acid construct comprises DNA.

[0013] In some such constructs, the first coding sequence is codon-optimized for expression in a host cell, the second coding sequence is codon-optimized for expression in the host cell, or both the first coding sequence and the second coding sequence are codon-optimized for expression in the host cell. In some such constructs, the nucleic acid construct comprises one or more of the following terminal structures: hairpin, loop, inverted terminal repeat (ITR), or toroid. Optionally, the nucleic acid construct comprises ITRs.

[0014] In some such constructs, the first retinoschisin protein or fragment thereof and/or the second retinoschisin protein or fragment thereof comprises, consists essentially of, or consists of a sequence at least about 90%, at least about 91%, at least about 92%, at least about 93%, at least about 94%, at least about 95%, at least about 96%, at least about 97%, at least about 98%, at least about 99%, or 100% identical to SEQ ID NO: 5. In some such constructs, the first coding sequence and/or the second coding sequence comprises, consists essentially of, or consists of a sequence at least about 90%, at least about 91%, at least about 92%, at least about 93%, at least about 94%, at least about 95%, at least about 96%, at least about 97%, at least about 98%, at least about 99%, or 100% identical to SEQ ID NO: 8 or 9. In some such constructs, the first coding sequence comprises, consists essentially of, or consists of a sequence at least about 90%, at least about 91%, at least about 92%, at least about 93%, at least about 94%, at least about 95%, at least about 96%, at least about 97%, at least about 98%, at least about 99%, or 100% identical to SEQ ID NO: 8, and the second coding sequence comprises, consists essentially of, or consists of a sequence at least about 90%, at least about 91%, at least about 92%, at least about 93%, at least about 94%, at least about 95%, at least about 96%, at least about 97%, at least about 98%, at least about 99%, or 100% identical to SEQ ID NO: 9. In some such constructs, the nucleic acid construct comprises, consists essentially of, or consists of a sequence at least about 90%, at least about 91%, at least about 92%, at least about 93%, at least about 94%, at least about 95%, at least about 96%, at least about 97%, at least about 98%, at least about 99%, or 100% identical to SEQ ID NO: 46 or 47.

[0015] In some such constructs, the second segment is located 3′ of the first segment, both the first retinoschisin protein or fragment thereof and the second retinoschisin protein or fragment thereof are a human retinoschisin protein or fragment thereof, the first retinoschisin protein or fragment thereof is identical to the second retinoschisin protein or fragment thereof, both the first coding sequence and the second coding sequence comprise complementary DNA (cDNA) comprising exons 2-6 of human RS1 or degenerate variants thereof, the second coding sequence adopts a different codon usage from the codon usage of the first coding sequence, the first segment comprises a first polyadenylation signal sequence located 3′ of the first coding sequence, and the second segment comprises a reverse complement of a second polyadenylation signal sequence located 5′ of the reverse complement of the second coding sequence, the first segment comprises a first splice acceptor site located 5′ of the first coding sequence, and the second segment comprises a reverse complement of a second splice acceptor site located 3′ of the reverse complement of the second coding sequence, the nucleic acid construct does not comprise a promoter that drives expression of the first retinoschisin protein or fragment thereof or the second retinoschisin protein or fragment thereof, and the nucleic acid construct does not comprise a homology arm.

[0016] In another aspect, provided are vectors comprising any of the above bidirectional nucleic acid constructs. Some such vectors are viral vectors. Optionally, the vector is an adeno-associated virus (AAV) vector. Optionally, the AAV comprises a single-stranded genome (ssAAV). Optionally, the AAV comprises a self-complementary genome (scAAV). Optionally, the AAV is selected from the group consisting of: AAV2, AAV5, AAV8, or AAV7m8.

[0017] Some such vectors do not comprise a promoter that drives expression of the first retinoschisin protein or fragment thereof or the second retinoschisin protein or fragment thereof. Some such vectors do not comprise a homology arm. Some such vectors do comprise homology arms.

[0018] In another aspect, provided are lipid nanoparticles comprising any of the above bidirectional nucleic acid constructs.

[0019] In another aspect, provided are cells comprising any of the above bidirectional nucleic acid constructs. Some such cells are in vitro. Some such cells are in vivo. Some such cells are mammalian cells. Some such cells are human cells. Some such cells are retinal cells.

[0020] Some such cells express the first retinoschisin protein or fragment thereof or the second retinoschisin protein or fragment thereof. In some such cells, the nucleic acid construct is genomically integrated at the target genomic locus. In some such cells, the target genomic locus is an endogenous RS1 locus. Optionally, the nucleic acid construct is genomically integrated in intron 1 of the endogenous RS1 locus. Optionally, endogenous RS1 exon 1 splices into the first coding sequence or the second coding sequence of the nucleic acid construct. Optionally, the modified RS1 locus comprising the genomically integrated nucleic acid construct encodes a protein comprising, consisting essentially of, or consisting of a sequence at least about 90%, at least about 91%, at least about 92%, at least about 93%, at least about 94%, at least about 95%, at least about 96%, at least about 97%, at least about 98%, at least about 99%, or 100% identical to SEQ ID NO: 2 or 4.

[0021] In some such cells, integration of the nucleic acid construct into the endogenous RS1 locus prevents transcription of the endogenous RS1 gene downstream of the integration site. Optionally, the integration of the nucleic acid construct into the endogenous RS1 locus reduces or eliminates expression of the endogenous retinoschisin protein and replaces it with expression of the retinoschisin protein or fragment thereof encoded by the nucleic acid construct. Optionally, the endogenous RS1 locus comprises a mutated RS1 gene comprising a mutation that causes X-linked juvenile retinoschisis, and expression of the genomically integrated nucleic acid construct reduces or eliminates expression of the mutated RS1 gene.

[0022] In another aspect, provided are nucleic acid constructs for homology-independent targeted integration into a target genomic locus. Some such nucleic acid constructs comprise a coding sequence for a retinoschisin protein or fragment thereof flanked on each side by a nuclease target sequence for a nuclease agent. Also provided are nucleic acid constructs for homologous recombination with a target locus. Some such nucleic acid constructs comprise a coding sequence for a retinoschisin protein or fragment thereof flanked by homology arms on each side, optionally wherein the coding sequence and homology arms are further flanked on each side by a target sequence for a nuclease agent. Optionally, each homology arm is between about 25 nucleotides and about 2.5 kb in length.

[0023] In some such constructs for homology-independent targeted integration, the nuclease target sequence in the nucleic acid construct is identical to a nuclease target sequence for integration into the target genomic locus, wherein the nuclease target sequence in the target genomic locus is destroyed if the nucleic acid construct is inserted in the correct orientation but is reformed if the nucleic acid construct is inserted into the target genomic locus in the opposite orientation.

[0024] In some such constructs, the retinoschisin protein or fragment thereof is a human retinoschisin protein or fragment thereof. In some such constructs, the coding sequence for the retinoschisin protein or fragment thereof comprises, consists essentially of, or consists of complementary DNA (cDNA). In some such constructs, the coding sequence for the retinoschisin protein or fragment thereof comprises, consists essentially of, or consists of exons 2-6 of human RS1 or degenerate variants thereof.

[0025] In some such constructs, the nucleic acid construct comprises a fragment or portion of the first intron of human RS1 located 5′ of the coding sequence. In some such constructs, the nucleic acid construct does not comprise a promoter that drives expression of the retinoschisin protein or fragment thereof. In some such constructs, the nucleic acid construct comprises a polyadenylation signal sequence located 3′ of the coding sequence. In some such constructs, the nucleic acid construct comprises a splice acceptor site located 5′ of the coding sequence. Optionally, the splice acceptor site is from an RS1 gene. Optionally, the splice acceptor site is from intron 1 of human RS1.

[0026] Some such constructs are single-stranded. Some such constructs are double-stranded. Some such constructs comprise DNA. In some such constructs, the coding sequence is codon-optimized for expression in a host cell.

[0027] In some such constructs, the construct comprises one or more of the following terminal structures: hairpin, loop, inverted terminal repeat (ITR), or toroid. Optionally, the nucleic acid construct comprising the coding sequence and the nuclease target sequences is flanked by ITRs.

[0028] In some such constructs, the nuclease agent is a Cas protein and a guide RNA, and the nuclease target sequence is a guide RNA target sequence. Optionally, the guide RNA target sequence is an inverted guide RNA target sequence. Optionally, the Cas protein is Cas9.

[0029] In some such constructs, the retinoschisin protein or fragment thereof comprises, consists essentially of, or consists of a sequence at least about 90%, at least about 91%, at least about 92%, at least about 93%, at least about 94%, at least about 95%, at least about 96%, at least about 97%, at least about 98%, at least about 99%, or 100% identical to SEQ ID NO: 5. In some such constructs, the coding sequence for the retinoschisin protein or fragment thereof comprises, consists essentially of, or consists of a sequence at least about 90%, at least about 91%, at least about 92%, at least about 93%, at least about 94%, at least about 95%, at least about 96%, at least about 97%, at least about 98%, at least about 99%, or 100% identical to SEQ ID NO: 8 or 9. In some such constructs, the nucleic acid construct comprises, consists essentially of, or consists of a sequence at least about 90%, at least about 91%, at least about 92%, at least about 93%, at least about 94%, at least about 95%, at least about 96%, at least about 97%, at least about 98%, at least about 99%, or 100% identical to SEQ ID NO: 45.

[0030] In some such constructs, the nucleic acid construct is the nucleic acid construct for homology-independent targeted integration into the target genomic locus, the retinoschisin protein or fragment thereof is a human retinoschisin protein or fragment thereof, the coding sequence for the retinoschisin protein or fragment thereof comprises complementary DNA (cDNA) comprising exons 2-6 of human RS1 or degenerate variants thereof, the nucleic acid construct does not comprise a promoter that drives expression of the retinoschisin protein or fragment thereof, the nucleic acid construct comprises a polyadenylation signal sequence located 3′ of the coding sequence, the nucleic acid construct comprises a splice acceptor site located 5′ of the coding sequence, and the nuclease target sequence in the nucleic acid construct is identical to a nuclease target sequence for integration into the target genomic locus, wherein the nuclease target sequence in the target genomic locus is destroyed if the nucleic acid construct is inserted in the correct orientation but is reformed if the nucleic acid construct is inserted into the target genomic locus in the opposite orientation.

[0031] In some such constructs, the nucleic acid construct is the nucleic acid construct for homologous recombination with the target genomic locus, the retinoschisin protein or fragment thereof is a human retinoschisin protein or fragment thereof, the coding sequence for the retinoschisin protein or fragment thereof comprises complementary DNA (cDNA) comprising exons 2-6 of human RS1 or degenerate variants thereof, the nucleic acid construct does not comprise a promoter that drives expression of the retinoschisin protein or fragment thereof, the nucleic acid construct comprises a polyadenylation signal sequence located 3′ of the coding sequence, the nucleic acid construct comprises a splice acceptor site located 5′ of the coding sequence, and each homology arm is between about 25 nucleotides and about 2.5 kb in length.

[0032] In another aspect, provided are vectors comprising any of the above nucleic acid constructs for homology-independent targeted integration. Some such vectors are viral vectors. Some such vectors are adeno-associated virus (AAV) vectors. Optionally, the AAV comprises a single-stranded genome (ssAAV). Optionally, the AAV comprises a self-complementary genome (scAAV). Optionally, the AAV is selected from the group consisting of: AAV2, AAV5, AAV8, or AAV7m8.

[0033] In some such vectors, the vector does not comprise a promoter that drives expression of the retinoschisin protein or fragment thereof. In some such vectors, the vector does not comprise a homology arm.

[0034] In another aspect, provided are lipid nanoparticles comprising any of the above nucleic acid constructs for homology-independent targeted integration.

[0035] In another aspect, provided are cells comprising any of the above nucleic acid constructs for homology-independent targeted integration. Some such cells are in vitro. Some such cells are in vivo. Some such cells are mammalian cells. Some such cells are human cells. Some such cells are retinal cells.

[0036] In some such cells, the cell expresses the retinoschisin protein or fragment thereof. In some such cells, the nucleic acid construct is genomically integrated at the target genomic locus. Optionally, the target genomic locus is an endogenous RS1 locus. Optionally, the nucleic acid construct is genomically integrated in intron 1 of the endogenous RS1 locus. Optionally, endogenous RS1 exon 1 splices into the coding sequence for the retinoschisin protein or fragment thereof in the nucleic acid construct. Optionally, the modified RS1 locus comprising the genomically integrated nucleic acid construct encodes a protein comprising, consisting essentially of, or consisting of a sequence at least about 90%, at least about 91%, at least about 92%, at least about 93%, at least about 94%, at least about 95%, at least about 96%, at least about 97%, at least about 98%, at least about 99%, or 100% identical to SEQ ID NO: 2 or 4.

[0037] In some such cells, integration of the nucleic acid construct into the endogenous RS1 locus prevents transcription of the endogenous RS1 gene downstream of the integration site. Optionally, the integration of the nucleic acid construct into the endogenous RS1 locus reduces or eliminates expression of the endogenous retinoschisin protein and replaces it with expression of the retinoschisin protein or fragment thereof encoded by the nucleic acid construct. Optionally, the endogenous RS1 locus comprises a mutated RS1 gene comprising a mutation that causes X-linked juvenile retinoschisis, and expression of the genomically integrated nucleic acid construct reduces or eliminates expression of the mutated RS1 gene.

[0038] In another aspect, provided are compositions for use in expressing retinoschisin in a cell or for use in integrating a coding sequence for a retinoschisin protein or fragment thereof into a target genomic locus in a cell. Some such compositions comprise: (a) a nucleic acid construct comprising the coding sequence for the retinoschisin protein or fragment thereof for integration into the target genomic locus; and (b) a nuclease agent or a nucleic acid encoding the nuclease agent, wherein the nuclease agent targets a nuclease target sequence in the target genomic locus.

[0039] Some such compositions comprise: (a) any of the above nucleic acid constructs for homology-independent targeted integration; and (b) a nuclease agent or a nucleic acid encoding the nuclease agent, wherein the nuclease agent targets a nuclease target sequence in the target genomic locus. Optionally, the nuclease target sequence in the target genomic locus is identical to the nuclease target sequence in the nucleic acid construct. Optionally, the nuclease target sequence in the target genomic locus is destroyed if the nucleic acid construct is inserted in the correct orientation but is reformed if the nucleic acid construct is inserted into the target genomic locus in the opposite orientation.

[0040] Some such compositions comprise: (a) any of the above bidirectional nucleic acid constructs; and (b) a nuclease agent or a nucleic acid encoding the nuclease agent, wherein the nuclease agent targets a nuclease target sequence in the target genomic locus.

[0041] In some such compositions, the target genomic locus is in an RS1 gene. Optionally, the nuclease target sequence in the target genomic locus is in the first intron in the RS1 gene. Optionally, integration of the nucleic acid construct into the endogenous RS1 locus prevents transcription of the endogenous RS1 gene downstream of the integration site. Optionally, the integration of the nucleic acid construct into the endogenous RS1 locus in the cell reduces or eliminates expression of the endogenous retinoschisin protein and replaces it with expression of the retinoschisin protein or fragment thereof encoded by the nucleic acid construct.

[0042] In some such compositions, the nuclease agent is a Cas protein and a guide RNA, and the nuclease target sequence is a guide RNA target sequence. Optionally, the Cas protein is Cas9. Optionally, the composition comprises the guide RNA and a messenger RNA encoding the Cas protein. Optionally, the guide RNA and the messenger RNA encoding the Cas protein are in a lipid nanoparticle. Optionally, the composition comprises a DNA encoding the Cas protein and a DNA encoding the guide RNA. Optionally, the DNA encoding the Cas protein and the DNA encoding the guide RNA are in one or more viral vectors. Optionally, the one or more viral vectors are adeno-associated virus (AAV) viral vectors. Optionally, the DNA encoding the Cas protein and the DNA encoding the guide RNA are in a single viral vector (e.g., a single AAV vector). Optionally, the DNA encoding the Cas protein and the DNA encoding the guide RNA are in a separate viral vectors (e.g., a separate AAV vectors).

[0043] In some such compositions, the nucleic acid construct is in a viral vector. Optionally, the viral vector is an adeno-associated virus (AAV) viral vector. Optionally, the AAV is selected from the group consisting of: AAV2, AAV5, AAV8, or AAV7m8.

[0044] Also provided are compositions comprising a guide RNA or a DNA encoding the guide RNA, wherein the guide RNA comprises a DNA-targeting segment that targets a guide RNA target sequence in an RS1 gene, and wherein the guide RNA binds to a Cas protein and targets the Cas protein to the guide RNA target sequence in the RS1 gene.

[0045] In some such compositions or compositions for use, the composition further comprises the Cas protein or a nucleic acid encoding the Cas protein. Optionally, the Cas protein is a Cas9 protein. Optionally, the Cas protein is derived from a Streptococcus pyogenes Cas9 protein. In some such compositions or compositions for use, the composition comprises the Cas protein in the form of a protein.

[0046] In some such compositions or compositions for use, the composition comprises the nucleic acid encoding the Cas protein, wherein the nucleic acid comprises a DNA encoding the Cas protein, optionally wherein the composition comprises the DNA encoding the guide RNA. Optionally, the composition comprises the nucleic acid encoding the Cas protein, wherein the nucleic acid comprises a DNA encoding the Cas protein, wherein the composition comprises the DNA encoding the guide RNA, and wherein the DNA encoding the Cas protein and the DNA encoding the guide RNA are in one or more viral vectors. Optionally, the one or more viral vectors are adeno-associated virus (AAV) viral vectors. Optionally, the DNA encoding the Cas protein and the DNA encoding the guide RNA are in a single viral vector (e.g., a single AAV vector). Optionally, the DNA encoding the Cas protein and the DNA encoding the guide RNA are in a separate viral vectors (e.g., a separate AAV vectors). Optionally, the AAV is selected from the group consisting of: AAV2, AAV5, AAV8, or AAV7m8.

[0047] In some such compositions or compositions for use, the composition comprises the nucleic acid encoding the Cas protein, wherein the nucleic acid comprises a messenger RNA encoding the Cas protein, optionally wherein the composition comprises the guide RNA in the form of RNA. In some such compositions or compositions for use, the composition comprises the nucleic acid encoding the Cas protein, wherein the nucleic acid comprises a messenger RNA encoding the Cas protein, wherein the composition comprises the guide RNA in the form of RNA, and wherein the guide RNA and the messenger RNA encoding the Cas protein are in a lipid nanoparticle.

[0048] In some such compositions or compositions for use, the messenger RNA encoding the Cas protein comprises at least one modification. Optionally, the messenger RNA encoding the Cas protein is modified to comprise a modified uridine at one or more or all uridine positions. Optionally, the modified uridine is pseudouridine. Optionally, the messenger RNA encoding the Cas protein is fully substituted with pseudouridine. In some such compositions or compositions for use, the messenger RNA encoding the Cas protein comprises a 5′ cap. In some such compositions or compositions for use, the messenger RNA encoding the Cas protein comprises a poly(A) tail. In some such compositions or compositions for use, the messenger RNA encoding the Cas protein comprises the sequence set forth in SEQ ID NO: 6243 or 6245.

[0049] In some such compositions or compositions for use, the nucleic acid encoding the Cas protein is codon-optimized for expression in a mammalian cell or a human cell. In some such compositions or compositions for use, the Cas protein comprises the sequence set forth in SEQ ID NO: 27, 6242, or 6246.

[0050] In some such compositions or compositions for use, the guide RNA target sequence is in an intron of the RS1 gene. Optionally, the intron is the first intron of the RS1 gene.

[0051] In some such compositions or compositions for use, the RS1 gene is a human RS1 gene.

[0052] In some such compositions or compositions for use, the DNA-targeting segment comprises: (a) at least 17, at least 18, at least 19, or at least 20 contiguous nucleotides of the sequence set forth in any one of SEQ ID NOS: 3148-6241; (b) at least 17, at least 18, at least 19, or at least 20 contiguous nucleotides of the sequence set forth in any one of SEQ ID NOS: 3148-4989; (c) at least 17, at least 18, at least 19, or at least 20 contiguous nucleotides of the sequence set forth in any one of SEQ ID NOS: 3148-3151, 3154-3186, 3188-3247, and 3249-4351; (d) at least 17, at least 18, at least 19, or at least 20 contiguous nucleotides of the sequence set forth in any one of SEQ ID NOS: 3150, 3151, 3159, 3675, 4297, and 4304; or (e) at least 17, at least 18, at least 19, or at least 20 contiguous nucleotides of the sequence set forth in any one of SEQ ID NOS: 4990-6241.

[0053] In some such compositions or compositions for use, the DNA-targeting segment is: (a) at least 90%, at least 91%, at least 92%, at least 93%, at least 94%, at least 95%, at least 96%, at least 97%, at least 98%, or at least 99% identical to the sequence set forth in any one of SEQ ID NOS: 3148-6241; (b) at least 90%, at least 91%, at least 92%, at least 93%, at least 94%, at least 95%, at least 96%, at least 97%, at least 98%, or at least 99% identical to the sequence set forth in any one of SEQ ID NOS: 3148-4989; (c) at least 90%, at least 91%, at least 92%, at least 93%, at least 94%, at least 95%, at least 96%, at least 97%, at least 98%, or at least 99% identical to the sequence set forth in any one of SEQ ID NOS: 3148-3151, 3154-3186, 3188-3247, and 3249-4351; (d) at least 90%, at least 91%, at least 92%, at least 93%, at least 94%, at least 95%, at least 96%, at least 97%, at least 98%, or at least 99% identical to the sequence set forth in any one of SEQ ID NOS: 3150, 3151, 3159, 3675, 4297, and 4304; or (e) at least 90%, at least 91%, at least 92%, at least 93%, at least 94%, at least 95%, at least 96%, at least 97%, at least 98%, or at least 99% identical to the sequence set forth in any one of SEQ ID NOS: 4990-6241.

[0054] In some such compositions or compositions for use, the DNA-targeting segment comprises, consists essentially of, or consists of the sequence set forth in: (a) any one of SEQ ID NOS: 3148-6241; (b) any one of SEQ ID NOS: 3148-4989; (c) any one of SEQ ID NOS: 3148-3151, 3154-3186, 3188-3247, and 3249-4351; (d) any one of SEQ ID NOS: 3150, 3151, 3159, 3675, 4297, and 4304; or (e) any one of SEQ ID NOS: 4990-6241.

[0055] In some such compositions or compositions for use, the DNA-targeting segment comprises at least 17, at least 18, at least 19, or at least 20 contiguous nucleotides of the sequence set forth in any one of SEQ ID NOS: 3150, 3151, 3159, 3675, 4297, and 4304.

[0056] In some such compositions or compositions for use, the DNA-targeting segment is at least 90%, at least 91%, at least 92%, at least 93%, at least 94%, at least 95%, at least 96%, at least 97%, at least 98%, or at least 99% identical to the sequence set forth in any one of SEQ ID NOS: 3150, 3151, 3159, 3675, 4297, and 4304.

[0057] In some such compositions or compositions for use, the DNA-targeting segment comprises, consists essentially of, or consist of the sequence set forth in any one of SEQ ID NOS: 3150, 3151, 3159, 3675, 4297, and 4304.

[0058] In some such compositions or compositions for use, the composition comprises the guide RNA in the form of RNA. In some such compositions or compositions for use, the composition comprises the DNA encoding the guide RNA.

[0059] In some such compositions or compositions for use, the guide RNA comprises at least one modification. In some such compositions or compositions for use, the at least one modification comprises a 2′-O-methyl-modified nucleotide. In some such compositions or compositions for use, the at least one modification comprise a phosphorothioate bond between nucleotides. In some such compositions or compositions for use, the at least one modification comprise a modification at one or more of the first five nucleotides at the 5′ end of the guide RNA. In some such compositions or compositions for use, the at least one modification comprises a modification at one or more of the last five nucleotides at the 3′ end of the guide RNA. In some such compositions or compositions for use, the at least one modification comprises phosphorothioate bonds between the first four nucleotides at the 5′ end of the guide RNA. In some such compositions or compositions for use, the at least one modification comprises phosphorothioate bonds between the last four nucleotides at the 3′ end of the guide RNA. In some such compositions or compositions for use, the at least one modification comprises 2′-O-methyl-modified nucleotides at the first three nucleotides at the 5′ end of the guide RNA. In some such compositions or compositions for use, the at least one modification comprises 2′-O-methyl-modified nucleotides at the last three nucleotides at the 3′ end of the guide RNA. In some such compositions or compositions for use, the at least one modification comprises: (i) phosphorothioate bonds between the first four nucleotides at the 5′ end of the guide RNA; (ii) phosphorothioate bonds between the last four nucleotides at the 3′ end of the guide RNA; (iii) 2′-O-methyl-modified nucleotides at the first three nucleotides at the 5′ end of the guide RNA; and (iv) 2′-O-methyl-modified nucleotides at the last three nucleotides at the 3′ end of the guide RNA. In some such compositions or compositions for use, the guide RNA comprises the modified nucleotides of SEQ ID NO: 44.

[0060] In some such compositions or compositions for use, the guide RNA is a single guide RNA (sgRNA). Optionally, the guide RNA comprises, consists essentially of, or consists of the sequence set forth in any one of SEQ ID NOS: 33-39 and 53. In some such compositions or compositions for use, the guide RNA is a dual guide RNA (dgRNA) comprising two separate RNA molecules comprising a CRISPR RNA (crRNA) and a trans-activating crRNA (tracrRNA). Optionally, the crRNA comprises the sequence set forth in any one of SEQ ID NOS: 29 and 52. Optionally, the tracrRNA comprises the sequence set forth in any one of SEQ ID NOS: 30-32.

[0061] In some such compositions or compositions for use, the composition is associated with a lipid nanoparticle, optionally wherein the composition comprises the guide RNA. In some such compositions or compositions for use, the DNA encoding the guide RNA is in a viral vector. In some such compositions or compositions for use, the viral vector is an adeno-associated virus (AAV) viral vector. Optionally, the DNA encoding the Cas protein and the DNA encoding the guide RNA are in a single viral vector (e.g., a single AAV vector). Optionally, the DNA encoding the Cas protein and the DNA encoding the guide RNA are in a separate viral vectors (e.g., a separate AAV vectors). Optionally, the AAV is selected from the group consisting of: AAV2, AAV5, AAV8, or AAV7m8.

[0062] In some such compositions or compositions for use, the composition is a pharmaceutical composition comprising a pharmaceutically acceptable carrier.

[0063] In some such compositions or compositions for use, the composition further comprises a second guide RNA or a DNA encoding the second guide RNA, wherein the second guide RNA comprises a DNA-targeting segment that targets a second guide RNA target sequence in the RS1 gene, and wherein the second guide RNA binds to the Cas protein and targets the Cas protein to the second guide RNA target sequence in the RS1 gene.

[0064] Also provided are cells comprising any of the above compositions or compositions for use. Optionally, the cell is in vitro. Optionally, the cell is in vivo. Some such cells are mammalian cells. Optionally, the cell is a human cell. Optionally, the cell is a retinal cell.

[0065] In some such cells, the cell expresses the first retinoschisin protein or fragment thereof or the second retinoschisin protein or fragment thereof. In some such cells, the nucleic acid construct is genomically integrated at the target genomic locus. Optionally, the target genomic locus is an endogenous RS1 locus. Optionally, the nucleic acid construct is genomically integrated in intron 1 of the endogenous RS1 locus. Optionally, endogenous RS1 exon 1 splices into the first coding sequence or the second coding sequence of the nucleic acid construct. Optionally, the modified RS1 locus comprising the genomically integrated nucleic acid construct encodes a protein comprising, consisting essentially of, or consisting of a sequence at least about 90%, at least about 91%, at least about 92%, at least about 93%, at least about 94%, at least about 95%, at least about 96%, at least about 97%, at least about 98%, at least about 99%, or 100% identical to SEQ ID NO: 2 or 4.

[0066] In some such cells, integration of the nucleic acid construct into the endogenous RS1 locus prevents transcription of the endogenous RS1 gene downstream of the integration site. Optionally, the integration of the nucleic acid construct into the endogenous RS1 locus reduces or eliminates expression of the endogenous retinoschisin protein and replaces it with expression of the retinoschisin protein or fragment thereof encoded by the nucleic acid construct. Optionally, the endogenous RS1 locus comprises a mutated RS1 gene comprising a mutation that causes X-linked juvenile retinoschisis, and expression of the genomically integrated nucleic acid construct reduces or eliminates expression of the mutated RS1 gene.

[0067] In another aspect, provided are methods of integrating a coding sequence for a retinoschisin protein or fragment thereof into a target genomic locus and expressing the retinoschisin protein or fragment thereof in a cell. Some such methods comprise administering any of the above nucleic acid constructs, vectors, lipid nanoparticles, or compositions to the cell, wherein the coding sequence is integrated into the target genomic locus and the retinoschisin protein or fragment thereof is expressed in the cell. Optionally, the cell is a mammalian cell. Optionally, the cell is a human cell. Optionally, the cell is a retinal cell. Optionally, the cell is in vitro. Optionally, the cell is in vivo. Optionally, the cell is a retinal cell in vivo, and the administering comprises subretinal injection or intravitreal injection.

[0068] In some such methods, the nucleic acid construct and the nuclease agent or the nucleic acid encoding the nuclease agent are administered simultaneously. In some such methods, the nucleic acid construct and the nuclease agent or the nucleic acid encoding the nuclease agent are administered sequentially in any order. Optionally, the nucleic acid construct is administered prior to the nuclease agent or the nucleic acid encoding the nuclease agent. Optionally, the nucleic acid construct is administered subsequent to the nuclease agent or the nucleic acid encoding the nuclease agent. Optionally, the time between the sequential administration is about 2 hours to about 48 hours. In some such methods, the nucleic acid construct and the nuclease agent or the nucleic acid encoding the nuclease agent are administered in the same delivery vehicle. In some such methods, the nucleic acid construct and the nuclease agent or the nucleic acid encoding the nuclease agent are administered in different delivery vehicles.

[0069] In some such methods, the target genomic locus is in an endogenous RS1 gene. Optionally, the nuclease target sequence in the target genomic locus is in the first intron in the endogenous RS1 gene. Optionally, the nucleic acid construct is genomically integrated in intron 1 of the endogenous RS1 locus, and wherein endogenous RS1 exon 1 splices into the coding sequence for the retinoschisin protein or fragment thereof in the nucleic acid construct. Optionally, the modified RS1 locus comprising the genomically integrated nucleic acid construct encodes a protein comprising, consisting essentially of, or consisting of a sequence at least about 90%, at least about 91%, at least about 92%, at least about 93%, at least about 94%, at least about 95%, at least about 96%, at least about 97%, at least about 98%, at least about 99%, or 100% identical to SEQ ID NO: 2 or 4. In some such methods, integration of the nucleic acid construct into the endogenous RS1 locus prevents transcription of the endogenous RS1 gene downstream of the integration site. Optionally, the integration of the nucleic acid construct into the endogenous RS1 locus reduces or eliminates expression of the endogenous retinoschisin protein from the endogenous RS1 locus and replaces it with expression of the retinoschisin protein or fragment thereof encoded by the nucleic acid construct.

[0070] In another aspect, provided are methods of treating a subject with X-linked juvenile retinoschisis. Some such methods can comprise administering any of the above nucleic acid constructs, vectors, lipid nanoparticles, or compositions to the subject, wherein the nucleic acid construct is integrated into and expressed from the target genomic locus in one or more retinal cells of the subject, and wherein a therapeutically effective level of retinoschisin expression is achieved in the subject. In some such methods, the subject is a human. In some such methods, the subject has an endogenous RS1 gene comprising at least one mutation associated with or that causes X-linked juvenile retinoschisis. Optionally, the mutation is a R141C mutation. In some such methods, the administering comprises subretinal injection or intravitreal injection. In some such methods, integration of the nucleic acid construct results in retinal structural restoration.

[0071] In some such methods, the nucleic acid construct and the nuclease agent or the nucleic acid encoding the nuclease agent are administered simultaneously. In some such methods, the nucleic acid construct and the nuclease agent or the nucleic acid encoding the nuclease agent are administered sequentially in any order. Optionally, the nucleic acid construct is administered prior to the nuclease agent or the nucleic acid encoding the nuclease agent. Optionally, the nucleic acid construct is administered subsequent to the nuclease agent or the nucleic acid encoding the nuclease agent. Optionally, the time between the sequential administration is about 2 hours to about 48 hours. In some such methods, the nucleic acid construct and the nuclease agent or the nucleic acid encoding the nuclease agent are administered in the same delivery vehicle. In some such methods, the nucleic acid construct and the nuclease agent or the nucleic acid encoding the nuclease agent are administered in different delivery vehicles.

[0072] In some such methods, the target genomic locus is in an endogenous RS1 gene. Optionally, the nuclease target sequence in the target genomic locus is in the first intron in the endogenous RS1 gene. Optionally, the nucleic acid construct is genomically integrated in intron 1 of the endogenous RS1 locus, and wherein endogenous RS1 exon 1 splices into the coding sequence for the retinoschisin protein or fragment thereof in the nucleic acid construct. Optionally, the modified RS1 locus comprising the genomically integrated nucleic acid construct encodes a protein comprising, consisting essentially of, or consisting of a sequence at least about 90%, at least about 91%, at least about 92%, at least about 93%, at least about 94%, at least about 95%, at least about 96%, at least about 97%, at least about 98%, at least about 99%, or 100% identical to SEQ ID NO: 2 or 4. In some such methods, integration of the nucleic acid construct into the endogenous RS1 locus prevents transcription of the endogenous RS1 gene downstream of the integration site. Optionally, the integration of the nucleic acid construct into the endogenous RS1 locus reduces or eliminates expression of the endogenous retinoschisin protein from the endogenous RS1 locus and replaces it with expression of the retinoschisin protein or fragment thereof encoded by the nucleic acid construct.

[0073] In another aspect, provided are methods of modifying an RS1 gene in a cell. Some such methods comprise administering to the cell any of the above compositions comprising the guide RNA or the DNA encoding the guide RNA and the Cas protein or the nucleic acid encoding the Cas protein, wherein the guide RNA binds to the Cas protein and targets the Cas protein to the guide RNA target sequence in the RS1 gene, and the Cas protein cleaves the guide RNA target sequence. In some such methods, the cell is a mammalian cell. Optionally, the cell is a human cell. Optionally, the cell is a retinal cell. Optionally, the cell is in vitro. Optionally, the cell is in vivo. In some such methods, the cell is a retinal cell, and the administering comprises subretinal injection or intravitreal injection. In some such methods, the guide RNA target sequence is in the first intron in the RS1 gene.

### BRIEF DESCRIPTION OF THE FIGURES

[0074] FIG. 1 (not to scale) shows a schematic of the murine Rs1 locus, including the location of the R141C mutation associated with X-linked juvenile retinoschisis (XLRS) and the insertion site for a nucleic acid construct comprising exons 2-6 of human RS1.

[0075] FIG. 2 shows an alignment of mouse retinoschisin, human retinoschisin, human retinoschisin with an R141C mutation, mouse retinoschisin with an R141C mutation, and a mouse/human retinoschisin hybrid expressed upon integration of a nucleic acid construct comprising exons 2-6 of human RS1 into intron 1 of the mouse Rs1 locus.

[0076] FIG. 3A (not to scale) shows a schematic of a bidirectional nucleic acid construct comprising a first segment comprising a splice acceptor (A), exons 2-6 of human RS1, and bovine growth hormone (bGH) polyA and a second segment comprising the reverse complement of SV40 polyA, the reverse complement of exons 2-6 of human RS1, and the reverse complement of a splice acceptor (A). The bidirectional construct also comprises a U6 promoter operably linked to a sequence encoding a guide RNA targeting intron 1 of the murine Rs1 locus in between the two human RS1 segments. The horizontal arrows flanking the star represent the next generation targeted resequencing amplicons designed for NGS. A bidirectional ssAAV construct is shown at the top, and a bidirectional scAAV construct is shown at the bottom.

[0077] FIG. 3B (not to scale) shows a schematic for a homology-independent targeted integration nucleic acid construct comprising a splice acceptor (A), exons 2-6 of human RS1, and a polyA sequence. The construct also comprises a U6 promoter operably linked to a sequence encoding a guide RNA targeting intron 1 of the murine Rs1 locus downstream of the human RS1 segment. The horizontal arrows flanking the star represent the next generation targeted resequencing amplicons designed for NGS.

[0078] FIG. 4 shows scoring of retinal cavities shown in optical coherence tomography (OCT) scans in eyes from Rosa^{Cas9}/⁺; Rs1^{R141C}/^{Y} mice injected with RS1 viral vector version 1, RS1 viral vector version 2, or RS1 viral vector version 3. A score of 1 was assigned if there were 1-4 cavities on at least one individual image. A score of 2 was assigned if there were ≥4 cavities on at least one individual image, but the cavities were not fused. A score of 3 was assigned if there were fused cavities on at least one individual image. A score of 4 was assigned if there were fused cavities on at least one individual image and the retina was stretched. The average scores for each treatment group were compared with a control group containing the pooled non-treated eyes by nonparametric Kruskal-Wallis one-way analysis of variance and Post hoc test Dunn's multiple comparisons test.

[0079] FIG. 5 shows NGS results from mouse retina samples in eyes from Rosa^{Cas9}/⁺; Rs1^{R141C}/^{Y} mice injected with RS1 viral vector version 1 (pssAAV mhRS1-sgu), RS1 viral vector version 2 (pscAAV rs1_tandem), or RS1 viral vector version 3 (pssAAV hRs1_HITI). Read counts for the four expected sequence variants are shown: (1) WT mouse, the mouse reference sequence not containing the R141C mutant; (2) mutant mouse, the mouse reference sequence harboring the R141C mutant; (3) humanized transcript 1, the human reference sequence; and (4) humanized transcript 2, the mouse codon-optimized human reference sequence. Next generation targeted resequencing amplicons were designed for the regions depicted in FIG. 3 (horizontal arrows). mRNA from the mouse retinas was used to generate cDNA to act as a template for next generation sequencing (NGS) amplification.

[0080] FIGS. 6A and 6B show NGS results from mouse retina samples in eyes from Rosa^{Cas9}/⁺; Rs1^{R141C}/^{Y} mice injected with RS1 viral vector version 1 (mhRS1-sgu), RS1 viral vector version 2 (pscAAV_rs1_tandem), or RS1 viral vector version 3 (hRs1_cDNA HITI). For these NGS results, a separate amplicon was used to amplify the Rs1 intron 1 guide RNA target sequence. Reads that matched the mouse reference sequence or contained non-homologous end joining were quantified to assess how often the guide RNA cut without making an insertion.

[0081] FIGS. 7A-7C show NGS results from mouse retina samples in eyes from Rosa^{Cas9}/⁺; RS1^{R141C}/^{Y} mice injected with RS1 viral vector version 1 (pssAAV mhRS1-sgu; FIG. 7A), RS1 viral vector version 2 (pscAAV rs1_tandem; FIG. 7B), or RS1 viral vector version 3 (pssAAV hRs1_HITI; FIG. 7C). Read counts for the four expected sequence variants are shown: (1) WT mouse, the mouse reference sequence not containing the R141C mutant; (2) mutant mouse, the mouse reference sequence harboring the R141C mutant; (3) humanized transcript 1, the human reference sequence; and (4) humanized transcript 2, the mouse codon-optimized human reference sequence. Next generation targeted resequencing amplicons were designed for the regions depicted in FIG. 3 (horizontal arrows). mRNA from the mouse retinas was used to generate cDNA to act as a template for next generation sequencing (NGS) amplification. Reads that matched the mouse reference sequence or contained non-homologous end joining were quantified to assess how often the guide RNA cut without making an insertion.

[0082] FIGS. 8A and 8B show RT-qPCR results from human retinoblastoma cells treated with RS1 viral vector version 1 (pssAAV mhRS1-sgu; FIG. 8A) or RS1 viral vector version 2 (pscAAV rs1_tandem; FIG. 8B) two hours before treatment with lipid nanoparticles formulated with Cas9 mRNA and one of six guide RNAs targeted to human RS1 intron 1. Delta Ct values are shown (the lower the number, the higher the expression). “Ho” refers to human reference sequence, and “Mo” refers to human reference sequence codon-optimized for mouse expression.

[0083] FIGS. 9A and 9B show RT-qPCR results from human retinoblastoma cells treated with RS1 viral vector version 1 (pssAAV mhRS1-sgu; FIG. 9A) or RS1 viral vector version 2 (pscAAV rs1_tandem; FIG. 9B) two hours after treatment with lipid nanoparticles formulated with Cas9 mRNA and one of six guide RNAs targeted to human RS1 intron 1. Delta Ct values are shown (the lower the number, the higher the expression). “Ho” refers to human reference sequence, and “Mo” refers to human reference sequence codon-optimized for mouse expression.

[0084] FIG. 10 shows a schematic for a nucleic acid construct for homologous recombination comprising a splice acceptor (A), exons 2-6 of human RS1, and a polyA sequence. The construct also comprises a U6 promoter operably linked to a sequence encoding a guide RNA targeting intron 1 of the murine Rs1 locus downstream of the human RS1 segment. The construct also comprises upstream and downstream homology arms (HA). The horizontal arrows flanking the star represent the next generation targeted resequencing amplicons designed for NGS.

### DEFINITIONS

[0085] The terms “protein,” “polypeptide,” and “peptide,” used interchangeably herein, include polymeric forms of amino acids of any length, including coded and non-coded amino acids and chemically or biochemically modified or derivatized amino acids. The terms also include polymers that have been modified, such as polypeptides having modified peptide backbones. The term “domain” refers to any part of a protein or polypeptide having a particular function or structure.

[0086] The terms “nucleic acid” and “polynucleotide,” used interchangeably herein, include polymeric forms of nucleotides of any length, including ribonucleotides, deoxyribonucleotides, or analogs or modified versions thereof. They include single-, double-, and multi-stranded DNA or RNA, genomic DNA, cDNA, DNA-RNA hybrids, and polymers comprising purine bases, pyrimidine bases, or other natural, chemically modified, biochemically modified, non-natural, or derivatized nucleotide bases.

[0087] The term “genomically integrated” refers to a nucleic acid that has been introduced into a cell such that the nucleotide sequence integrates into the genome of the cell. Any protocol may be used for the stable incorporation of a nucleic acid into the genome of a cell.

[0088] The term “expression vector” or “expression construct” or “expression cassette” refers to a recombinant nucleic acid containing a desired coding sequence operably linked to appropriate nucleic acid sequences necessary for the expression of the operably linked coding sequence in a particular host cell or organism. Nucleic acid sequences necessary for expression in prokaryotes usually include a promoter, an operator (optional), and a ribosome binding site, as well as other sequences. Eukaryotic cells are generally known to utilize promoters, enhancers, and termination and polyadenylation signals, although some elements may be deleted and other elements added without sacrificing the necessary expression.

[0089] The term “viral vector” refers to a recombinant nucleic acid that includes at least one element of viral origin and includes elements sufficient for or permissive of packaging into a viral vector particle. The vector and/or particle can be utilized for the purpose of transferring DNA, RNA, or other nucleic acids into cells either ex vivo or in vivo. Numerous forms of viral vectors are known.

[0090] The term “isolated” with respect to proteins, nucleic acids, and cells includes proteins, nucleic acids, and cells that are relatively purified with respect to other cellular or organism components that may normally be present in situ, up to and including a substantially pure preparation of the protein, nucleic acid, or cell. The term “isolated” may include proteins and nucleic acids that have no naturally occurring counterpart or proteins or nucleic acids that have been chemically synthesized and are thus substantially uncontaminated by other proteins or nucleic acids. The term “isolated” may include proteins, nucleic acids, or cells that have been separated or purified from most other cellular components or organism components with which they are naturally accompanied (e.g., but not limited to, other cellular proteins, nucleic acids, or cellular or extracellular components).

[0091] The term “wild type” includes entities having a structure and/or activity as found in a normal (as contrasted with mutant, diseased, altered, or so forth) state or context. Wild type genes and polypeptides often exist in multiple different forms (e.g., alleles).

[0092] The term “endogenous sequence” refers to a nucleic acid sequence that occurs naturally within a cell or animal. For example, an endogenous RS1 sequence of an animal refers to a native RS1 sequence that naturally occurs at the RS1 locus in the animal.

[0093] “Exogenous” molecules or sequences include molecules or sequences that are not normally present in a cell in that form. Normal presence includes presence with respect to the particular developmental stage and environmental conditions of the cell. An exogenous molecule or sequence, for example, can include a mutated version of a corresponding endogenous sequence within the cell, such as a humanized version of the endogenous sequence, or can include a sequence corresponding to an endogenous sequence within the cell but in a different form (i.e., not within a chromosome). In contrast, endogenous molecules or sequences include molecules or sequences that are normally present in that form in a particular cell at a particular developmental stage under particular environmental conditions.

[0094] The term “heterologous” when used in the context of a nucleic acid or a protein indicates that the nucleic acid or protein comprises at least two segments that do not naturally occur together in the same molecule. For example, the term “heterologous,” when used with reference to segments of a nucleic acid or segments of a protein, indicates that the nucleic acid or protein comprises two or more sub-sequences that are not found in the same relationship to each other (e.g., joined together) in nature. As one example, a “heterologous” region of a nucleic acid vector is a segment of nucleic acid within or attached to another nucleic acid molecule that is not found in association with the other molecule in nature. For example, a heterologous region of a nucleic acid vector could include a coding sequence flanked by sequences not found in association with the coding sequence in nature. Likewise, a “heterologous” region of a protein is a segment of amino acids within or attached to another peptide molecule that is not found in association with the other peptide molecule in nature (e.g., a fusion protein, or a protein with a tag). Similarly, a nucleic acid or protein can comprise a heterologous label or a heterologous secretion or localization sequence.

[0095] “Codon optimization” takes advantage of the degeneracy of codons, as exhibited by the multiplicity of three-base pair codon combinations that specify an amino acid, and generally includes a process of modifying a nucleic acid sequence for enhanced expression in particular host cells by replacing at least one codon of the native sequence with a codon that is more frequently or most frequently used in the genes of the host cell while maintaining the native amino acid sequence. For example, a nucleic acid encoding a Cas9 protein can be modified to substitute codons having a higher frequency of usage in a given prokaryotic or eukaryotic cell, including a bacterial cell, a yeast cell, a human cell, a non-human cell, a mammalian cell, a rodent cell, a mouse cell, a rat cell, a hamster cell, or any other host cell, as compared to the naturally occurring nucleic acid sequence. Codon usage tables are readily available, for example, at the “Codon Usage Database.” These tables can be adapted in a number of ways. See Nakamura et al. (2000) Nucleic Acids Research 28:292, herein incorporated by reference in its entirety for all purposes. Computer algorithms for codon optimization of a particular sequence for expression in a particular host are also available (see, e.g., Gene Forge).

[0096] The term “locus” refers to a specific location of a gene (or significant sequence), DNA sequence, polypeptide-encoding sequence, or position on a chromosome of the genome of an organism. For example, an “RS1 locus” may refer to the specific location of an RS1 gene, RS1 DNA sequence, retinoschisin-encoding sequence, or RS1 position on a chromosome of the genome of an organism that has been identified as to where such a sequence resides. An “RS1 locus” may comprise a regulatory element of an RS1 gene, including, for example, an enhancer, a promoter, 5′ and/or 3′ untranslated region (UTR), or a combination thereof.

[0097] The term “gene” refers to DNA sequences in a chromosome that may contain, if naturally present, at least one coding and at least one non-coding region. The DNA sequence in a chromosome that codes for a product (e.g., but not limited to, an RNA product and/or a polypeptide product) can include the coding region interrupted with non-coding introns and sequence located adjacent to the coding region on both the 5′ and 3′ ends such that the gene corresponds to the full-length mRNA (including the 5′ and 3′ untranslated sequences). Additionally, other non-coding sequences including regulatory sequences (e.g., but not limited to, promoters, enhancers, and transcription factor binding sites), polyadenylation signals, internal ribosome entry sites, silencers, insulating sequence, and matrix attachment regions may be present in a gene. These sequences may be close to the coding region of the gene (e.g., but not limited to, within 10 kb) or at distant sites, and they influence the level or rate of transcription and translation of the gene.

[0098] The term “allele” refers to a variant form of a gene. Some genes have a variety of different forms, which are located at the same position, or genetic locus, on a chromosome. A diploid organism has two alleles at each genetic locus. Each pair of alleles represents the genotype of a specific genetic locus. Genotypes are described as homozygous if there are two identical alleles at a particular locus and as heterozygous if the two alleles differ.

[0099] A “promoter” is a regulatory region of DNA usually comprising a TATA box capable of directing RNA polymerase II to initiate RNA synthesis at the appropriate transcription initiation site for a particular polynucleotide sequence. A promoter may additionally comprise other regions which influence the transcription initiation rate. The promoter sequences disclosed herein modulate transcription of an operably linked polynucleotide. A promoter can be active in one or more of the cell types disclosed herein (e.g., a eukaryotic cell, a non-human mammalian cell, a human cell, a rodent cell, a pluripotent cell, a one-cell stage embryo, a differentiated cell, or a combination thereof). A promoter can be, for example, a constitutively active promoter, a conditional promoter, an inducible promoter, a temporally restricted promoter (e.g., a developmentally regulated promoter), or a spatially restricted promoter (e.g., a cell-specific or tissue-specific promoter). Examples of promoters can be found, for example, in WO 2013/176772, herein incorporated by reference in its entirety for all purposes.

[0100] A constitutive promoter is one that is active in all tissues or particular tissues at all developing stages. Examples of constitutive promoters include the human cytomegalovirus immediate early (hCMV), mouse cytomegalovirus immediate early (mCMV), human elongation factor 1 alpha (hEF1α), mouse elongation factor 1 alpha (mEF1α), mouse phosphoglycerate kinase (PGK), chicken beta actin hybrid (CAG or CBh), SV40 early, and beta 2 tubulin promoters.

[0101] Examples of inducible promoters include, for example, chemically regulated promoters and physically-regulated promoters. Chemically regulated promoters include, for example, alcohol-regulated promoters (e.g., an alcohol dehydrogenase (alcA) gene promoter), tetracycline-regulated promoters (e.g., a tetracycline-responsive promoter, a tetracycline operator sequence (tetO), a tet-On promoter, or a tet-Off promoter), steroid regulated promoters (e.g., a rat glucocorticoid receptor, a promoter of an estrogen receptor, or a promoter of an ecdysone receptor), or metal-regulated promoters (e.g., a metalloprotein promoter). Physically regulated promoters include, for example temperature-regulated promoters (e.g., a heat shock promoter) and light-regulated promoters (e.g., a light-inducible promoter or a light-repressible promoter).

[0102] Tissue-specific promoters can be, for example, neuron-specific promoters, glia-specific promoters, muscle cell-specific promoters, heart cell-specific promoters, kidney cell-specific promoters, bone cell-specific promoters, endothelial cell-specific promoters, or immune cell-specific promoters (e.g., a B cell promoter or a T cell promoter).

[0103] Developmentally regulated promoters include, for example, promoters active only during an embryonic stage of development, or only in an adult cell.

[0104] “Operable linkage” or being “operably linked” includes juxtaposition of two or more components (e.g., a promoter and another sequence element) such that both components function normally and allow the possibility that at least one of the components can mediate a function that is exerted upon at least one of the other components. For example, a promoter can be operably linked to a coding sequence if the promoter controls the level of transcription of the coding sequence in response to the presence or absence of one or more transcriptional regulatory factors. Operable linkage can include such sequences being contiguous with each other or acting in trans (e.g., a regulatory sequence can act at a distance to control transcription of the coding sequence).

[0105] “Complementarity” of nucleic acids means that a nucleotide sequence in one strand of nucleic acid, due to orientation of its nucleobase groups, forms hydrogen bonds with another sequence on an opposing nucleic acid strand. The complementary bases in DNA are typically A with T and C with G. In RNA, they are typically C with G and U with A. Complementarity can be perfect or substantial/sufficient. Perfect complementarity between two nucleic acids means that the two nucleic acids can form a duplex in which every base in the duplex is bonded to a complementary base by Watson-Crick pairing. “Substantial” or “sufficient” complementary means that a sequence in one strand is not completely and/or perfectly complementary to a sequence in an opposing strand, but that sufficient bonding occurs between bases on the two strands to form a stable hybrid complex in set of hybridization conditions (e.g., salt concentration and temperature). Such conditions can be predicted by using the sequences and standard mathematical calculations to predict the Tm (melting temperature) of hybridized strands, or by empirical determination of Tm by using routine methods. Tm includes the temperature at which a population of hybridization complexes formed between two nucleic acid strands are 50% denatured (i.e., a population of double-stranded nucleic acid molecules becomes half dissociated into single strands). At a temperature below the Tm, formation of a hybridization complex is favored, whereas at a temperature above the Tm, melting or separation of the strands in the hybridization complex is favored. Tm may be estimated for a nucleic acid having a known G+C content in an aqueous 1 M NaCl solution by using, e.g., Tm=81.5+0.41(% G+C), although other known Tm computations consider nucleic acid structural characteristics.

[0106] Hybridization requires that the two nucleic acids contain complementary sequences, although mismatches between bases are possible. The conditions appropriate for hybridization between two nucleic acids depend on the length of the nucleic acids and the degree of complementation, variables which are well known. The greater the degree of complementation between two nucleotide sequences, the greater the value of the melting temperature (Tm) for hybrids of nucleic acids having those sequences. For hybridizations between nucleic acids with short stretches of complementarity (e.g. complementarity over 35 or fewer, 30 or fewer, 25 or fewer, 22 or fewer, 20 or fewer, or 18 or fewer nucleotides) the position of mismatches becomes important (see Sambrook et al., supra, 11.7-11.8). Typically, the length for a hybridizable nucleic acid is at least about 10 nucleotides. Illustrative minimum lengths for a hybridizable nucleic acid include at least about 15 nucleotides, at least about 20 nucleotides, at least about 22 nucleotides, at least about 25 nucleotides, and at least about 30 nucleotides. Furthermore, the temperature and wash solution salt concentration may be adjusted as necessary according to factors such as length of the region of complementation and the degree of complementation.

[0107] The sequence of polynucleotide need not be 100% complementary to that of its target nucleic acid to be specifically hybridizable. Moreover, a polynucleotide may hybridize over one or more segments such that intervening or adjacent segments are not involved in the hybridization event (e.g., a loop structure or hairpin structure). A polynucleotide (e.g., gRNA) can comprise at least 70%, at least 80%, at least 90%, at least 95%, at least 99%, or 100% sequence complementarity to a target region within the target nucleic acid sequence to which they are targeted. For example, a gRNA in which 18 of 20 nucleotides are complementary to a target region, and would therefore specifically hybridize, would represent 90% complementarity. In this example, the remaining noncomplementary nucleotides may be clustered or interspersed with complementary nucleotides and need not be contiguous to each other or to complementary nucleotides.

[0108] Percent complementarity between particular stretches of nucleic acid sequences within nucleic acids can be determined routinely using BLAST programs (basic local alignment search tools) and PowerBLAST programs (Altschul et al. (1990) J. Mol. Biol. 215:403-410; Zhang and Madden (1997) Genome Res. 7:649-656) or by using the Gap program (Wisconsin Sequence Analysis Package, Version 8 for Unix, Genetics Computer Group, University Research Park, Madison Wis.), using default settings, which uses the algorithm of Smith and Waterman (Adv. Appl. Math., 1981, 2, 482-489).

[0109] The methods and compositions provided herein employ a variety of different components. Some components throughout the description can have active variants and fragments. Such components include, for example, Cas proteins, CRISPR RNAs, tracrRNAs, and guide RNAs. Biological activity for each of these components is described elsewhere herein. The term “functional” refers to the innate ability of a protein or nucleic acid (or a fragment or variant thereof) to exhibit a biological activity or function. Such biological activities or functions can include, for example, the ability of a Cas protein to bind to a guide RNA and to a target DNA sequence. The biological functions of functional fragments or variants may be the same or may in fact be changed (e.g., with respect to their specificity or selectivity or efficacy) in comparison to the original molecule, but with retention of the molecule's basic biological function.

[0110] The term “variant” refers to a nucleotide sequence differing from the sequence most prevalent in a population (e.g., by one nucleotide) or a protein sequence different from the sequence most prevalent in a population (e.g., by one amino acid).

[0111] The term “fragment,” when referring to a protein, means a protein that is shorter or has fewer amino acids than the full-length protein. The term “fragment,” when referring to a nucleic acid, means a nucleic acid that is shorter or has fewer nucleotides than the full-length nucleic acid. A fragment can be, for example, when referring to a protein fragment, an N-terminal fragment (i.e., removal of a portion of the C-terminal end of the protein), a C-terminal fragment (i.e., removal of a portion of the N-terminal end of the protein), or an internal fragment (i.e., removal of a portion of an internal portion of the protein).

[0112] “Sequence identity” or “identity” in the context of two polynucleotides or polypeptide sequences refers to the residues in the two sequences that are the same when aligned for maximum correspondence over a specified comparison window. When percentage of sequence identity is used in reference to proteins, residue positions which are not identical often differ by conservative amino acid substitutions, where amino acid residues are substituted for other amino acid residues with similar chemical properties (e.g., charge or hydrophobicity) and therefore do not change the functional properties of the molecule. When sequences differ in conservative substitutions, the percent sequence identity may be adjusted upwards to correct for the conservative nature of the substitution. Sequences that differ by such conservative substitutions are said to have “sequence similarity” or “similarity.” Means for making this adjustment are well known. Typically, this involves scoring a conservative substitution as a partial rather than a full mismatch, thereby increasing the percentage sequence identity. Thus, for example, where an identical amino acid is given a score of 1 and a non-conservative substitution is given a score of zero, a conservative substitution is given a score between zero and 1. The scoring of conservative substitutions is calculated, e.g., as implemented in the program PC/GENE (Intelligenetics, Mountain View, California).

[0113] “Percentage of sequence identity” includes the value determined by comparing two optimally aligned sequences (greatest number of perfectly matched residues) over a comparison window, wherein the portion of the polynucleotide sequence in the comparison window may comprise additions or deletions (i.e., gaps) as compared to the reference sequence (which does not comprise additions or deletions) for optimal alignment of the two sequences. The percentage is calculated by determining the number of positions at which the identical nucleic acid base or amino acid residue occurs in both sequences to yield the number of matched positions, dividing the number of matched positions by the total number of positions in the window of comparison, and multiplying the result by 100 to yield the percentage of sequence identity. Unless otherwise specified (e.g., the shorter sequence includes a linked heterologous sequence), the comparison window is the full length of the shorter of the two sequences being compared.

[0114] Unless otherwise stated, sequence identity/similarity values include the value obtained using GAP Version 10 using the following parameters: % identity and % similarity for a nucleotide sequence using GAP Weight of 50 and Length Weight of 3, and the nwsgapdna.cmp scoring matrix; % identity and % similarity for an amino acid sequence using GAP Weight of 8 and Length Weight of 2, and the BLOSUM62 scoring matrix; or any equivalent program thereof. “Equivalent program” includes any sequence comparison program that, for any two sequences in question, generates an alignment having identical nucleotide or amino acid residue matches and an identical percent sequence identity when compared to the corresponding alignment generated by GAP Version 10.

[0115] The term “conservative amino acid substitution” refers to the substitution of an amino acid that is normally present in the sequence with a different amino acid of similar size, charge, or polarity. Examples of conservative substitutions include the substitution of a non-polar (hydrophobic) residue such as isoleucine, valine, or leucine for another non-polar residue. Likewise, examples of conservative substitutions include the substitution of one polar (hydrophilic) residue for another such as between arginine and lysine, between glutamine and asparagine, or between glycine and serine. Additionally, the substitution of a basic residue such as lysine, arginine, or histidine for another, or the substitution of one acidic residue such as aspartic acid or glutamic acid for another acidic residue are additional examples of conservative substitutions. Examples of non-conservative substitutions include the substitution of a non-polar (hydrophobic) amino acid residue such as isoleucine, valine, leucine, alanine, or methionine for a polar (hydrophilic) residue such as cysteine, glutamine, glutamic acid or lysine and/or a polar residue for a non-polar residue. Typical amino acid categorizations are summarized in Table 1 below.

TABLE 1
Amino Acid Categorizations.

| | | | | | |
|---|---|---|---|---|---|
| Alanine | Ala | A | Nonpolar | Neutral | 1.8 |
| Arginine | Arg | R | Polar | Positive | −4.5 |
| Asparagine | Asn | N | Polar | Neutral | −3.5 |
| Aspartic acid | Asp | D | Polar | Negative | −3.5 |
| Cysteine | Cys | C | Nonpolar | Neutral | 2.5 |
| Glutamic acid | Glu | E | Polar | Negative | −3.5 |
| Glutamine | Gin | Q | Polar | Neutral | −3.5 |
| Glycine | Gly | G | Nonpolar | Neutral | −0.4 |
| Histidine | His | H | Polar | Positive | −3.2 |
| Isoleucine | Ile | I | Nonpolar | Neutral | 4.5 |
| Leucine | Leu | L | Nonpolar | Neutral | 3.8 |
| Lysine | Lys | K | Polar | Positive | −3.9 |
| Methionine | Met | M | Nonpolar | Neutral | 1.9 |
| Phenylalanine | Phe | F | Nonpolar | Neutral | 2.8 |
| Proline | Pro | P | Nonpolar | Neutral | −1.6 |
| Serine | Ser | S | Polar | Neutral | −0.8 |
| Threonine | Thr | T | Polar | Neutral | −0.7 |
| Tryptophan | Trp | W | Nonpolar | Neutral | −0.9 |
| Tyrosine | Tyr | Y | Polar | Neutral | −1.3 |
| Valine | Val | V | Nonpolar | Neutral | 4.2 |

[0116] A “homologous” sequence (e.g., nucleic acid sequence) includes a sequence that is either identical or substantially similar to a known reference sequence, such that it is, for example, at least 50%, at least 55%, at least 60%, at least 65%, at least 70%, at least 75%, at least 80%, at least 85%, at least 90%, at least 95%, at least 96%, at least 97%, at least 98%, at least 99%, or 100% identical to the known reference sequence. Homologous sequences can include, for example, orthologous sequence and paralogous sequences. Homologous genes, for example, typically descend from a common ancestral DNA sequence, either through a speciation event (orthologous genes) or a genetic duplication event (paralogous genes). “Orthologous” genes include genes in different species that evolved from a common ancestral gene by speciation. Orthologs typically retain the same function in the course of evolution. “Paralogous” genes include genes related by duplication within a genome. Paralogs can evolve new functions in the course of evolution.

[0117] The term “in vitro” includes artificial environments and to processes or reactions that occur within an artificial environment (e.g., a test tube or an isolated cell or cell line). The term “in vivo” includes natural environments (e.g., a cell or organism or body) and to processes or reactions that occur within a natural environment. The term “ex vivo” includes cells that have been removed from the body of an individual and processes or reactions that occur within such cells.

[0118] Repair in response to double-strand breaks (DSBs) occurs principally through two conserved DNA repair pathways: homologous recombination (HR) and non-homologous end joining (NHEJ). See Kasparek & Humphrey (2011) Seminars in Cell & Dev. Biol. 22:886-897, herein incorporated by reference in its entirety for all purposes. Likewise, repair of a target nucleic acid mediated by an exogenous donor nucleic acid can include any process of exchange of genetic information between the two polynucleotides.

[0119] The term “recombination” includes any process of exchange of genetic information between two polynucleotides and can occur by any mechanism. Recombination can occur via homology directed repair (HDR) or homologous recombination (HR). HDR or HR includes a form of nucleic acid repair that can require nucleotide sequence homology, uses a “donor” molecule as a template for repair of a “target” molecule (i.e., the one that experienced the double-strand break), and leads to transfer of genetic information from the donor to target. Without wishing to be bound by any particular theory, such transfer can involve mismatch correction of heteroduplex DNA that forms between the broken target and the donor, and/or synthesis-dependent strand annealing, in which the donor is used to resynthesize genetic information that will become part of the target, and/or related processes. In some cases, the donor polynucleotide, a portion of the donor polynucleotide, a copy of the donor polynucleotide, or a portion of a copy of the donor polynucleotide integrates into the target DNA. See Wang et al. (2013) Cell 153:910-918; Mandalos et al. (2012) PLOS ONE 7:e45768:1-9; and Wang et al. (2013) Nat Biotechnol. 31:530-532, each of which is herein incorporated by reference in its entirety for all purposes.

[0120] Non-homologous end joining (NHEJ) includes the repair of double-strand breaks in a nucleic acid by direct ligation of the break ends to one another or to an exogenous sequence without the need for a homologous template. Ligation of non-contiguous sequences by NHEJ can often result in deletions, insertions, or translocations near the site of the double-strand break. For example, NHEJ can also result in the targeted integration of an exogenous donor nucleic acid through direct ligation of the break ends with the ends of the exogenous donor nucleic acid (i.e., NHEJ-based capture). Such NHEJ-mediated targeted integration can be preferred for insertion of an exogenous donor nucleic acid when homology directed repair (HDR) pathways are not readily usable (e.g., in non-dividing cells, primary cells, and cells which perform homology-based DNA repair poorly). In addition, in contrast to homology-directed repair, knowledge concerning large regions of sequence identity flanking the cleavage site is not needed, which can be beneficial when attempting targeted insertion into organisms that have genomes for which there is limited knowledge of the genomic sequence. The integration can proceed via ligation of blunt ends between the exogenous donor nucleic acid and the cleaved genomic sequence, or via ligation of sticky ends (i.e., having 5′ or 3′ overhangs) using an exogenous donor nucleic acid that is flanked by overhangs that are compatible with those generated by a nuclease agent in the cleaved genomic sequence. See, e.g., US 2011/020722, WO 2014/033644, WO 2014/089290, and Maresca et al. (2013) Genome Res. 23(3):539-546, each of which is herein incorporated by reference in its entirety for all purposes. If blunt ends are ligated, target and/or donor resection may be needed to generation regions of microhomology needed for fragment joining, which may create unwanted alterations in the target sequence.

[0121] Compositions or methods “comprising” or “including” one or more recited elements may include other elements not specifically recited. For example, a composition that “comprises” or “includes” a protein may contain the protein alone or in combination with other ingredients. The transitional phrase “consisting essentially of” means that the scope of a claim is to be interpreted to encompass the specified elements recited in the claim and those that do not materially affect the basic and novel characteristic(s) of the claimed invention. Thus, the term “consisting essentially of” when used in a claim of this invention is not intended to be interpreted to be equivalent to “comprising.”

[0122] “Optional” or “optionally” means that the subsequently described event or circumstance may or may not occur and that the description includes instances in which the event or circumstance occurs and instances in which the event or circumstance does not.

[0123] Designation of a range of values includes all integers within or defining the range, and all subranges defined by integers within the range.

[0124] Unless otherwise apparent from the context, the term “about” encompasses values±5 of a stated value.

[0125] The term “and/or” refers to and encompasses any and all possible combinations of one or more of the associated listed items, as well as the lack of combinations when interpreted in the alternative (“or”).

[0126] The term “or” refers to any one member of a particular list and also includes any combination of members of that list.

[0127] The singular forms of the articles “a,” “an,” and “the” include plural references unless the context clearly dictates otherwise. For example, the term “a protein” or “at least one protein” can include a plurality of proteins, including mixtures thereof.

[0128] Statistically significant means p≤0.05.

### DETAILED DESCRIPTION

### I. Overview

[0129] X-linked juvenile retinoschisis (XLRS) is juvenile-onset macular degeneration caused by mutations in retinoschisin (RS1). The RS1 gene encodes a 24 kDa discoidin-domain-containing protein that is secreted as a homo-oligomeric complex. Gene mutations of RS1 lead to either a non-functional protein or the absence of protein secretion, which causes schisis or splitting within the retinal layers leading to early and progressive vision loss. More than 200 different mutations in the RS1 gene are known to cause XLRS. Forty percent of the disease-causing mutations are nonsense or frameshift mutations that are predicted to result in the absence of a full-length retinoschisin protein. Fifty percent of the disease-causing mutations are missense mutations that allow for production of full-length mutant protein. Most of these are in the discoidin domain and result in misfolded protein retained in ER.

[0130] Because XLRS is a recessive disease caused by the loss in retinoschisin function, gene replacement therapy is as a potential treatment for this disease. Furthermore, because retinoschisin functions as an extracellular protein, beneficial treatment is not necessarily restricted to the transfected cell expressing the replacement gene but can encompass a wider area due to the spread of the secreted protein from the site of expression.

[0131] Provided herein are nucleic acid constructs and compositions that allow insertion of a retinoschisin coding sequence into a target genomic locus such as an endogenous RS1 locus and/or expression of the retinoschisin coding sequence. The nucleic acid constructs and compositions can be used in methods for integration into a target genomic locus and/or expression in a cell or in methods of treating X-linked juvenile retinoschisis. Also provided are nuclease agents (e.g., targeting an endogenous RS1 locus) or nucleic acids encoding nuclease agents to facilitate integration of the nucleic acid constructs into a target genomic locus such as an endogenous RS1 locus.

[0132] Integration of the nucleic acid construct into an endogenous RS1 locus, such as intron 1 of RS1, can prevent transcription of the endogenous RS1 gene downstream of the integration site. The integration of the nucleic acid construct into the endogenous RS1 locus can reduce or eliminate expression of the endogenous retinoschisin protein (e.g., an endogenous retinoschisin protein with an XLRS-causing mutation) and replace it with expression of the retinoschisin protein or fragment or variant thereof encoded by the nucleic acid construct (e.g., retinoschisin without an XLRS-causing mutation). In one example, integration of the nucleic acid construct into the endogenous RS1 locus reduces expression of the endogenous retinoschisin protein. In another example, integration of the nucleic acid construct into the endogenous RS1 locus eliminates expression of the endogenous retinoschisin protein. In this way, integration of the nucleic acid construct can simultaneously knock out the endogenous RS1 gene (e.g., an endogenous RS1 gene comprising one or more mutations associated with or that cause XLRS, such as R141C) and knock in a replacement retinoschisin coding sequence (e.g., a replacement retinoschisin coding sequence that does not comprise mutations associated with or that cause XLRS).

### II. Nucleic Acid Constructs Comprising a Retinoschisin Coding Sequence for Integration into and Expression From a Target Genomic Locus

[0133] Provided herein are nucleic acid constructs (i.e., exogenous donor nucleic acids) comprising a retinoschisin coding sequence (i.e., encoding a retinoschisin protein or fragment or variant thereof) for integration into and expression from a target genomic locus. The nucleic acid constructs can be isolated nucleic acid constructs.

[0134] Retinoschisin (X-linked juvenile retinoschisis protein) is a protein required for normal structure and function of the retina. An exemplary human retinoschisin protein is assigned UniProt Accession No. 015537 and has the sequence set forth in SEQ ID NO: 2. Orthologs in other species are also known. For example, an exemplary mouse retinoschisin protein is assigned UniProt Accession No. Q9Z1L4 and has the sequence set forth in SEQ ID NO: 1. Retinoschisin is encoded by the RS1 gene (also known as XLRS1). The human RS1 gene contains six separate exons interspaced by five introns. The human RS1 gene is assigned NCBI GeneID 6247. The mouse Rs1 gene is assigned NCBI GeneID 20147. An exemplary coding sequence for human RS1 is assigned CCDS ID CCDS14187.1 and is set forth in SEQ ID NO: 6. Mutations in retinoschisin cause X-linked juvenile retinoschisis (XLRS), a vitreo-retinal dystrophy characterized by macular pathology and by splitting of the superficial layer of the retina. The nucleic acid constructs disclosed herein can be used in methods to treat XLRS as described in more detail elsewhere herein.

[0135] The functional domains of RS1 are a signal peptide (SP), RS1, and the discoidin domains. The signal sequence guides the translocation of nascent RS1 from the endoplasmic reticulum (the site of synthesis) to external leaflet of the plasma membrane, during which signal sequence is cleaved by signal peptidase to generate mature protein with characteristic RS1 and a highly conserved discoidin domain. The different subdomains of RS1 signal sequence are the positively charged N region at the amino terminal end which mediates translocation, the hydrophobic core (H) required for targeting and membrane insertion and a polar “C” region that determines the site of recognition and cleavage by signal peptidase. RS1 is prominently expressed by the retinal photoreceptor and bipolar cells and is also in the pineal gland.

[0136] The retinoschisin coding sequence included in the nucleic acid constructs disclosed herein can be a coding sequence for a full-length retinoschisin protein or a fragment or variant thereof. In one example, the retinoschisin coding sequence included in the nucleic acid construct does not include the first exon of RS1. For example, the retinoschisin coding sequence included in the nucleic acid construct can include exons 2-6 of an RS1 gene or variants or degenerate variants thereof. As one example, a cDNA fragment comprising exons 2-6 of an RS1 gene can comprise the sequence set forth in SEQ ID NO: 8. Although each of the 64 codons is specific for only one amino acid or stop signal, the genetic code is degenerate (i.e., redundant) because a single amino acid may be coded for by more than one codon. A degenerate variant of a gene encodes the same protein but uses at least one different codon. The retinoschisin coding sequence in the nucleic acid construct can comprise complementary DNA (cDNA) without intervening introns, or the nucleic acid construct can comprise one or more introns separating exons in the retinoschisin coding sequence. For example, the nucleic acid construct can comprise a sequence corresponding to the RS1 genomic locus having both exons and introns.

[0137] The retinoschisin coding sequence can be from any organism. For example, the retinoschisin coding sequence can be mammalian, non-human mammalian, rodent, mouse, rat, or human or variants thereof. Alternatively, the retinoschisin coding sequence can be chimeric (e.g., part mouse and part human). In a specific example, the retinoschisin coding sequence is a human retinoschisin coding sequence.

[0138] The retinoschisin coding sequence can be codon-optimized for efficient translation into retinoschisin in a particular cell or organism. As one example, a codon-optimized version of exons 2-6 of human RS1 is set forth in SEQ ID NO: 9. For example, the nucleic acid can be modified to substitute codons having a higher frequency of usage in a human cell, a non-human cell, a mammalian cell, a rodent cell, a mouse cell, a rat cell, or any other host cell of interest.

[0139] The retinoschisin coding sequence can encode a wild type retinoschisin protein or a fragment or variant thereof. Likewise, the retinoschisin coding sequence can be a wild type coding sequence or variant thereof. In one example, the retinoschisin coding sequence does not comprise any mutations associated with or that cause X-linked juvenile retinoschisis. Alternatively, the retinoschisin coding sequence can comprise one or more mutations associated with or that cause X-linked juvenile retinoschisis (e.g., R141C).

[0140] The nucleic acid construct can further comprise one or more RS1 introns or fragments or variants thereof (e.g., one or more human RS1 introns or fragments or variants thereof). For example, the nucleic acid construct can comprise RS1 intron 1 or a fragment or variant thereof. The RS1 intron or the fragment or variant thereof can comprise a splice acceptor site or a fragment thereof. Examples of fragments of RS1 intron 1 are set forth in SEQ ID NOS: 15 and 16. In one specific example, the nucleic acid construct can comprise RS1 intron 1 or a fragment or variant thereof located 5′ of exons 2-6 of RS1 (e.g., upstream of a cDNA sequence comprising, consisting essentially of, or consisting of exons 2-6 of RS1).

[0141] The nucleic acid constructs can further comprise one or more splice acceptor sites. Examples of sequences (e.g., intronic sequences) and reverse complements thereof comprising splice acceptor sites are set forth in SEQ ID NOS: 15-21. For example, the nucleic acid construct can comprise a splice acceptor site located 5′ of the retinoschisin coding sequence. In a specific example, the retinoschisin coding sequence comprises, consists essentially of, or consists of exons 2-6 of RS1 (e.g., exons 2-6 of human RS1), and the splice acceptor site is the splice acceptor site from intron 1 of RS1 (e.g., human RS1) used in splicing RS1 exon 1 to RS1 exon 2. The term splice acceptor site refers to a nucleic acid sequence at a 3′ intron/exon boundary that can be recognized and bound by splicing machinery.

[0142] The nucleic acid constructs disclosed herein can also comprise post-transcriptional regulatory elements, such as the woodchuck hepatitis virus post-transcriptional regulatory element.

[0143] The nucleic acid constructs can further comprise one or more polyadenylation signal sequences. Examples of polyadenylation signal sequences, or sequences comprising polyadenylation signal sequences, or reverse complements thereof are set forth in SEQ ID NOS: 22-25. For example, the nucleic acid construct can comprise a polyadenylation signal sequence located 3′ of the retinoschisin coding sequence. Any suitable polyadenylation signal sequence can be used. The term polyadenylation signal sequence refers to any sequence that directs termination of transcription and addition of a poly-A tail to the mRNA transcript. In eukaryotes, transcription terminators are recognized by protein factors, and termination is followed by polyadenylation, a process of adding a poly(A) tail to the mRNA transcripts in presence of the poly(A) polymerase. The mammalian poly(A) signal typically consists of a core sequence, about 45 nucleotides long, that may be flanked by diverse auxiliary sequences that serve to enhance cleavage and polyadenylation efficiency. The core sequence consists of a highly conserved upstream element (AATAAA or AAUAAA) in the mRNA, referred to as a poly A recognition motif or poly A recognition sequence), recognized by cleavage and polyadenylation-specificity factor (CPSF), and a poorly defined downstream region (rich in Us or Gs and Us), bound by cleavage stimulation factor (CstF). Examples of transcription terminators that can be used include, for example, the human growth hormone (HGH) polyadenylation signal, the simian virus 40 (SV40) late polyadenylation signal, the rabbit beta-globin polyadenylation signal, the bovine growth hormone (BGH) polyadenylation signal, the phosphoglycerate kinase (PGK) polyadenylation signal, an AOX1 transcription termination sequence, a CYC1 transcription termination sequence, or any transcription termination sequence known to be suitable for regulating gene expression in eukaryotic cells.

[0144] The nucleic acid constructs can also comprise a polyadenylation signal sequence upstream of the retinoschisin coding sequence. The polyadenylation signal sequence upstream of the retinoschisin coding sequence can be flanked by recombinase recognition sites recognized by a site-specific recombinase. In some constructs, the recombinase recognition sites also flank a selection cassette comprising, for example, the coding sequence for a drug resistance protein. In other constructs, the recombinase recognition sites do not flank a selection cassette. The polyadenylation signal sequence prevents transcription and expression of the protein or RNA encoded by the coding sequence. However, upon exposure to the site-specific recombinase, the polyadenylation signal sequence will be excised, and the protein or RNA can be expressed.

[0145] Such a configuration can enable tissue-specific expression or developmental-stage-specific expression in animals comprising the retinoschisin coding sequence if the polyadenylation signal sequence is excised in a tissue-specific or developmental-stage-specific manner. Excision of the polyadenylation signal sequence in a tissue-specific or developmental-stage-specific manner can be achieved if an animal comprising the nucleic acid construct further comprises a coding sequence for the site-specific recombinase operably linked to a tissue-specific or developmental-stage-specific promoter. The polyadenylation signal sequence will then be excised only in those tissues or at those developmental stages, enabling tissue-specific expression or developmental-stage-specific expression. In one example, the retinoschisin or fragment or variant thereof encoded by the nucleic acid constructs can be expressed in an eye-specific or retinal-cell-specific manner.

[0146] Site-specific recombinases include enzymes that can facilitate recombination between recombinase recognition sites, where the two recombination sites are physically separated within a single nucleic acid or on separate nucleic acids. Examples of recombinases include Cre, Flp, and Dre recombinases. One example of a Cre recombinase gene is Crei, in which two exons encoding the Cre recombinase are separated by an intron to prevent its expression in a prokaryotic cell. Such recombinases can further comprise a nuclear localization signal to facilitate localization to the nucleus (e.g., NLS-Crei). Recombinase recognition sites include nucleotide sequences that are recognized by a site-specific recombinase and can serve as a substrate for a recombination event. Examples of recombinase recognition sites include FRT, FRT11, FRT71, attp, att, rox, and lox sites such as loxP, lox511, lox2272, lox66, lox71, loxM2, and lox5171.

[0147] The nucleic acid constructs can further comprise a promoter operably linked to the retinoschisin coding sequence. The retinoschisin coding sequence in the nucleic acid construct can be operably linked to any suitable promoter for expression in vivo within an animal or in vitro within an isolated cell. The promoter can be a constitutively active promoter (e.g., a CAG promoter or a U6 promoter), a conditional promoter, an inducible promoter, a temporally restricted promoter (e.g., a developmentally regulated promoter), or a spatially restricted promoter (e.g., a cell-specific or tissue-specific promoter). Such promoters are well-known and are discussed elsewhere herein. Promoters that can be used in an expression construct include promoters active, for example, in one or more of a eukaryotic cell, a human cell, a non-human cell, a mammalian cell, a non-human mammalian cell, a rodent cell, a mouse cell, a rat cell, a hamster cell, a rabbit cell, a pluripotent cell, an eye cell, a retinal cell, an embryonic stem (ES) cell, or a zygote. In a specific example, the promoter is active in an eye cell or a retinal cell.

[0148] Alternatively, some nucleic acid constructs do not comprise a promoter operably linked to the retinoschisin coding sequence (e.g., some nucleic acid constructs are promoterless constructs). Such nucleic acid constructs can be designed, for example, to be operably linked to an endogenous promoter at a target genomic locus (e.g., an endogenous RS1 promoter at an endogenous RS1 locus) upon integration into the target genomic locus.

[0149] Any target genomic locus capable of expressing a gene can be used, such as a safe harbor locus (safe harbor gene) or an endogenous RS1 locus. Interactions between integrated exogenous DNA and a host genome can limit the reliability and safety of integration and can lead to overt phenotypic effects that are not due to the targeted genetic modification but are instead due to unintended effects of the integration on surrounding endogenous genes. For example, randomly inserted transgenes can be subject to position effects and silencing, making their expression unreliable and unpredictable. Likewise, integration of exogenous DNA into a chromosomal locus can affect surrounding endogenous genes and chromatin, thereby altering cell behavior and phenotypes. Safe harbor loci include chromosomal loci where transgenes or other exogenous nucleic acid inserts can be stably and reliably expressed in all tissues of interest without overtly altering cell behavior or phenotype (i.e., without any deleterious effects on the host cell). See, e.g., Sadelain et al. (2012) Nat. Rev. Cancer 12:51-58, herein incorporated by reference in its entirety for all purposes. For example, the safe harbor locus can be one in which expression of the inserted gene sequence is not perturbed by any read-through expression from neighboring genes. For example, safe harbor loci can include chromosomal loci where exogenous DNA can integrate and function in a predictable manner without adversely affecting endogenous gene structure or expression. Safe harbor loci can include extragenic regions or intragenic regions such as, for example, loci within genes that are non-essential, dispensable, or able to be disrupted without overt phenotypic consequences.

[0150] Such safe harbor loci can offer an open chromatin configuration in all tissues and can be ubiquitously expressed during embryonic development and in adults. See, e.g., Zambrowicz et al. (1997) Proc. Natl. Acad. Sci. U.S.A. 94:3789-3794, herein incorporated by reference in its entirety for all purposes. In addition, the safe harbor loci can be targeted with high efficiency, and safe harbor loci can be disrupted with no overt phenotype. Examples of safe harbor loci include albumin, CCR5, HPRT, AAVS1, and Rosa26. See, e.g., U.S. Pat. Nos. 7,888,121; 7,972,854; 7,914,796; 7,951,925; 8,110,379; 8,409,861; 8,586,526; and US Patent Publication Nos. 2003/0232410; 2005/0208489; 2005/0026157; 2006/0063231; 2008/0159996; 2010/00218264; 2012/0017290; 2011/0265198; 2013/0137104; 2013/0122591; 2013/0177983; 2013/0177960; and 2013/0122591, each of which is herein incorporated by reference in its entirety for all purposes.

[0151] The target genomic locus can also be an endogenous RS1 locus, such as an endogenous RS1 locus comprising one or more mutations associated with or that cause XLRS (e.g., an R141C mutation in the encoded retinoschisin protein). Integration of the nucleic acid construct into the endogenous RS1 locus can, in some cases, prevent transcription of the endogenous RS1 gene downstream of the integration site. The integration of the nucleic acid construct into the endogenous RS1 locus can reduce or eliminate expression of the endogenous retinoschisin protein and replace it with expression of the retinoschisin protein or fragment or variant thereof encoded by the nucleic acid construct. In one example, integration of the nucleic acid construct into the endogenous RS1 locus reduces expression of the endogenous retinoschisin protein. In another example, integration of the nucleic acid construct into the endogenous RS1 locus eliminates expression of the endogenous retinoschisin protein. In this way, integration of the nucleic acid construct can simultaneously knock out the endogenous RS1 gene (e.g., an endogenous RS1 gene comprising one or more mutations associated with or that cause XLRS) and knock in a replacement retinoschisin coding sequence (e.g., a replacement retinoschisin coding sequence that does not comprise mutations associated with or that cause XLRS).

[0152] The nucleic acid construct can be integrated into any part of the target genomic locus. For example, the nucleic acid construct can be inserted into an intron or an exon of a target genomic locus or can replace one or more introns and/or exons of a target genomic locus. In a specific example, the nucleic acid construct can be integrated into an intron of the target genomic locus, such as the first intron of the target genomic locus (e.g., RS1 intron 1). Expression cassettes integrated into a target genomic locus can be operably linked to an endogenous promoter at the target genomic locus (e.g., the endogenous RS1 promoter) or can be operably linked to an exogenous promoter that is heterologous to the target genomic locus (e.g., a CMV promoter).

[0153] The nucleic acid constructs can comprise deoxyribonucleic acid (DNA) or ribonucleic acid (RNA), they can be single-stranded or double-stranded, and they can be in linear or circular form. For example, the nucleic acid construct can be a single-stranded oligodeoxynucleotide (ssODN). See, e.g., Yoshimi et al. (2016) Nat. Commun. 7:10431, herein incorporated by reference in its entirety for all purposes. The nucleic acid constructs can be naked nucleic acids or can be delivered by vectors, such as AAV vectors. In a specific example, the nucleic acid construct can be delivered via AAV and can be capable of insertion into an endogenous RS1 locus by non-homologous end joining (e.g., the nucleic acid construct can be one that does not comprise homology arms). If introduced in linear form, the ends of the nucleic acid construct (e.g., donor sequence) can be protected (e.g., from exonucleolytic degradation) by well-known methods. For example, one or more dideoxynucleotide residues can be added to the 3′ terminus of a linear molecule and/or self-complementary oligonucleotides can be ligated to one or both ends. See, e.g., Chang et al. (1987) Proc. Natl. Acad. Sci. U.S.A. 84:4959-4963 and Nehls et al. (1996) Science 272:886-889, each of which is herein incorporated by reference in its entirety for all purposes. Additional methods for protecting exogenous polynucleotides from degradation include, but are not limited to, addition of terminal amino group(s) and the use of modified internucleotide linkages such as, for example, phosphorothioates, phosphoramidates, and O-methyl ribose or deoxyribose residues.

[0154] An exemplary nucleic acid construct is between about 50 nucleotides to about 5 kb in length or between about 50 nucleotides to about 3 kb in length. Alternatively, a nucleic acid construct can be between about 1 kb to about 1.5 kb, about 1.5 kb to about 2 kb, about 2 kb to about 2.5 kb, about 2.5 kb to about 3 kb, about 3 kb to about 3.5 kb, about 3.5 kb to about 4 kb, about 4 kb to about 4.5 kb, or about 4.5 kb to about 5 kb in length. Alternatively, a nucleic acid construct can be, for example, no more than 5 kb, 4.5 kb, 4 kb, 3.5 kb, 3 kb, or 2.5 kb in length.

[0155] Integration of a nucleic acid construct at a target genomic locus can result in addition of a nucleic acid sequence of interest to the target genomic locus or replacement of a nucleic acid sequence of interest at the target genomic locus (i.e., deletion and insertion). Some nucleic acid constructs are designed for insertion of a nucleic acid construct at a target genomic locus without any corresponding deletion at the target genomic locus. Other nucleic acid constructs are designed to delete a nucleic acid sequence of interest at a target genomic locus and replace it with a nucleic acid construct.

[0156] The nucleic acid construct or the corresponding nucleic acid at the target genomic locus being deleted and/or replaced can be various lengths. An exemplary nucleic acid construct or corresponding nucleic acid at the target genomic locus being deleted and/or replaced is between about 1 nucleotide to about 5 kb in length or is between about 1 nucleotide to about 3 kb nucleotides in length. For example, a nucleic acid construct or a corresponding nucleic acid at the target genomic locus being deleted and/or replaced can be between about 1 to about 100, about 100 to about 200, about 200 to about 300, about 300 to about 400, about 400 to about 500, about 500 to about 600, about 600 to about 700, about 700 to about 800, about 800 to about 900, or about 900 to about 1,000 nucleotides in length. Likewise, a nucleic acid construct or a corresponding nucleic acid at the target genomic locus being deleted and/or replaced can be between about 1 kb to about 1.5 kb, about 1.5 kb to about 2 kb, about 2 kb to about 2.5 kb, about 2.5 kb to about 3 kb, about 3 kb to about 3.5 kb, about 3.5 kb to about 4 kb, about 4 kb to about 4.5 kb, about 4.5 kb to about 5 kb in length, or longer.

[0157] The nucleic acid construct or the corresponding nucleic acid at the target genomic locus being deleted and/or replaced can be a coding region such as an exon; a non-coding region such as an intron, an untranslated region, or a regulatory region (e.g., a promoter, an enhancer, or a transcriptional repressor-binding element), or any combination thereof.

[0158] The nucleic acid constructs can, in some cases, comprise one or more of the following terminal structures: hairpin, loop, inverted terminal repeat (ITR), or toroid. For example, the nucleic acid construct can comprise ITRs.

[0159] Some such nucleic acid constructs can modify the target genomic locus (e.g., but not limited to, an endogenous RS1 locus) following cleavage or nicking of the target genomic locus with a nuclease agent such as a Cas protein. The nucleic acid construct can be designed to repair the cleaved or nicked locus via non-homologous end joining (NHEJ)-mediated ligation or homology-directed repair. Optionally, repair with the nucleic acid construct removes or disrupts the nuclease target sequence so that alleles that have been targeted cannot be re-targeted by the nuclease agent.

[0160] Some nucleic acid constructs comprise homology arms. The homology arms can be symmetrical (e.g., each 40 nucleotides or each 60 nucleotides in length), or they can be asymmetrical (e.g., one homology arm or complementary region that is 36 nucleotides in length, and one homology arm or complementary region that is 91 nucleotides in length). Other nucleic acid constructs do not comprise homology arms.

[0161] Some nucleic acid constructs disclosed herein comprise homology arms. The homology arms can flank the retinoschisin coding sequence. For ease of reference, the homology arms are referred to herein as 5′ and 3′ (i.e., upstream and downstream) homology arms. This terminology relates to the relative position of the homology arms to a nucleic acid insert (e.g., the retinoschisin coding sequence) within a nucleic acid construct. The 5′ and 3′ homology arms correspond to regions within the target genomic locus, which are referred to herein as “5′ target sequence” and “3′ target sequence,” respectively.

[0162] A homology arm and a target sequence “correspond” or are “corresponding” to one another when the two regions share a sufficient level of sequence identity to one another to act as substrates for a homologous recombination reaction. The term “homology” includes DNA sequences that are either identical or share sequence identity to a corresponding sequence. The sequence identity between a given target sequence and the corresponding homology arm found in the nucleic acid construct can be any degree of sequence identity that allows for homologous recombination to occur. For example, the amount of sequence identity shared by the homology arm of the nucleic acid construct (or a fragment thereof) and the target sequence (or a fragment thereof) can be at least 50%, 55%, 60%, 65%, 70%, 75%, 80%, 81%, 82%, 83%, 84%, 85%, 86%, 87%, 88%, 89%, 90%, 91%, 92%, 93%, 94%, 95%, 96%, 97%, 98%, 99% or 100% sequence identity, such that the sequences undergo homologous recombination. Moreover, a corresponding region of homology between the homology arm and the corresponding target sequence can be of any length that is sufficient to promote homologous recombination. Exemplary homology arms are between about 25 nucleotides to about 2.5 kb in length, are between about 25 nucleotides to about 1.5 kb in length, or are between about 25 to about 500 nucleotides in length. For example, a given homology arm (or each of the homology arms) and/or corresponding target sequence can comprise corresponding regions of homology that are between about 25 to about 30, about 30 to about 40, about 40 to about 50, about 50 to about 60, about 60 to about 70, about 70 to about 80, about 80 to about 90, about 90 to about 100, about 100 to about 150, about 150 to about 200, about 200 to about 250, about 250 to about 300, about 300 to about 350, about 350 to about 400, about 400 to about 450, or about 450 to about 500 nucleotides in length, such that the homology arms have sufficient homology to undergo homologous recombination with the corresponding target sequences within the target nucleic acid. Alternatively, a given homology arm (or each homology arm) and/or corresponding target sequence can comprise corresponding regions of homology that are between about 0.5 kb to about 1 kb, about 1 kb to about 1.5 kb, about 1.5 kb to about 2 kb, or about 2 kb to about 2.5 kb in length. For example, the homology arms can each be about 750 nucleotides in length. In another example, the homology arms can each be about 150 to about 750, about 200 to about 700, about 250 to about 650, about 300 to about 600, about 350 to about 550, about 400 to about 500, about 150 to about 450, about 200 to about 450, about 250 to about 450, about 300 to about 450, about 350 to about 450, about 400 to about 450, about 450 to about 500, about 450 to about 550, about 450 to about 600, about 450 to about 650, about 450 to about 700, about 450 to about 750, or about 450 nucleotides in length. In another example, the homology arms can each be about 500 to about 1300, about 550 to about 1250, about 600 to about 1200, about 650 to about 1150, about 700 to about 1100, about 750 to about 1050, about 800 to about 1000, about 850 to about 950, about 500 to about 900, about 550 to about 900, about 600 to about 900, about 650 to about 900, about 700 to about 900, about 750 to about 900, about 800 to about 900, about 850 to about 900, about 900 to about 950, about 900 to about 1000, about 900 to about 1050, about 900 to about 1100, about 900 to about 1150, about 900 to about 1200, about 900 to about 1250, about 900 to about 1300, or about 900 nucleotides in length. In another example, the homology arms can each be about 1500 to about 2100, about 1550 to about 2050, about 1600 to about 2000, about 1650 to about 1950, about 1700 to about 1900, about 1750 to about 1850, about 1500 to about 1800, about 1550 to about 1800, about 1600 to about 1800, about 1650 to about 1800, about 1700 to about 1800, about 1750 to about 1800, about 1800 to about 1850, about 1800 to about 1900, about 1800 to about 1950, about 1800 to about 2000, about 1800 to about 2050, about 1800 to about 2100, or about 1800 nucleotides. In another example, each homology arm is no more than about 450 nucleotides, no more than about 900 nucleotides, or no more than about 1800 nucleotides. In another example, each homology arm is at least about 450 nucleotides, at least about 900 nucleotides, or at least about 1800 nucleotides. The homology arms can be symmetrical (each about the same size in length), or they can be asymmetrical (one longer than the other).

[0163] When a CRISPR/Cas system or other nuclease agent is used in combination with an nucleic acid construct disclosed herein, the 5′ and 3′ target sequences can be located in sufficient proximity to the nuclease cleavage site (e.g., within sufficient proximity to a guide RNA target sequence) so as to promote the occurrence of a homologous recombination event between the target sequences and the homology arms upon a single-strand break (nick) or double-strand break at the nuclease cleavage site or nuclease cleavage site. The term “nuclease cleavage site” includes a DNA sequence at which a nick or double-strand break is created by a nuclease agent (e.g., a Cas9 protein complexed with a guide RNA). The target sequences within the targeted locus that correspond to the 5′ and 3′ homology arms of the nucleic acid construct are “located in sufficient proximity” to a nuclease cleavage site if the distance is such as to promote the occurrence of a homologous recombination event between the 5′ and 3′ target sequences and the homology arms upon a single-strand break or double-strand break at the nuclease cleavage site. Thus, the target sequences corresponding to the 5′ and/or 3′ homology arms of the nucleic acid construct can be, for example, within at least 1 nucleotide of a given nuclease cleavage site or within at least 10 nucleotides to about 1,000 nucleotides of a given nuclease cleavage site. As an example, the nuclease cleavage site can be immediately adjacent to at least one or both of the target sequences.

[0164] The spatial relationship of the target sequences that correspond to the homology arms of the nucleic acid construct and the nuclease cleavage site can vary. For example, target sequences can be located 5′ to the nuclease cleavage site, target sequences can be located 3′ to the nuclease cleavage site, or the target sequences can flank the nuclease cleavage site.

[0165] Other nucleic acid constructs do not comprise any homology arms. Such nucleic acid constructs can be capable of insertion by non-homologous end joining. For example, such nucleic acid constructs can be inserted into a blunt end double-strand break following cleavage with a nuclease agent. In a specific example, the nucleic acid construct acid can be delivered via AAV and can be capable of insertion into a target genomic locus by non-homologous end joining (e.g., the nucleic acid construct can be one that does not comprise homology arms).

[0166] In a specific example, the nucleic acid construct can be inserted via homology-independent targeted integration. For example, the retinoschisin coding sequence in the nucleic acid construct can be flanked on each side by a target site for a nuclease agent (e.g., the same target site as in the target genomic locus, and the same nuclease agent being used to cleave the target site in the target genomic locus). The nuclease agent can then cleave the target sites flanking the retinoschisin coding sequence. In a specific example, the nucleic acid construct is delivered AAV-mediated delivery, and cleavage of the target sites flanking the retinoschisin coding sequence can remove the inverted terminal repeats (ITRs) of the AAV. In some methods, the target site in the target genomic locus (e.g., a gRNA target sequence including the flanking protospacer adjacent motif) is no longer present if the retinoschisin coding sequence is inserted into the target genomic locus in the correct orientation but it is reformed if the retinoschisin coding sequence is inserted into the target genomic locus in the opposite orientation. This can help ensure that the retinoschisin coding sequence is inserted in the correct orientation for expression.

[0167] In one exemplary nucleic acid construct for homology-independent targeted integration into a target genomic locus, the retinoschisin protein or fragment thereof is a human retinoschisin protein or fragment thereof, the coding sequence for the retinoschisin protein or fragment thereof comprises complementary DNA (cDNA) comprising exons 2-6 of human RS1 or degenerate variants thereof, the nucleic acid construct does not comprise a promoter that drives expression of the retinoschisin protein or fragment thereof, the nucleic acid construct comprises a polyadenylation signal sequence located 3′ of the coding sequence, the nucleic acid construct comprises a splice acceptor site located 5′ of the coding sequence, and the nuclease target sequence in the nucleic acid construct is identical to a nuclease target sequence for integration into the target genomic locus, wherein the nuclease target sequence in the target genomic locus is destroyed if the nucleic acid construct is inserted in the correct orientation but is reformed if the nucleic acid construct is inserted into the target genomic locus in the opposite orientation.

[0168] In one exemplary nucleic acid construct for homology-independent targeted integration into a target genomic locus, the retinoschisin protein or fragment thereof comprises, consists essentially of, or consists of a sequence at least about 90%, at least about 91%, at least about 92%, at least about 93%, at least about 94%, at least about 95%, at least about 96%, at least about 97%, at least about 98%, at least about 99%, or 100% identical to SEQ ID NO: 2 or 5. In one exemplary nucleic acid construct for homology-independent targeted integration into a target genomic locus, the coding sequence for the retinoschisin protein or fragment thereof comprises, consists essentially of, or consists of a sequence at least about 90%, at least about 91%, at least about 92%, at least about 93%, at least about 94%, at least about 95%, at least about 96%, at least about 97%, at least about 98%, at least about 99%, or 100% identical to SEQ ID NO: 6, 8, or 9 or degenerate variants thereof. In one exemplary nucleic acid construct for homology-independent targeted integration into a target genomic locus, the nucleic acid construct comprises, consists essentially of, or consists of a sequence at least about 90%, at least about 91%, at least about 92%, at least about 93%, at least about 94%, at least about 95%, at least about 96%, at least about 97%, at least about 98%, at least about 99%, or 100% identical to SEQ ID NO: 45.

[0169] Other nucleic acid constructs can have short single-stranded regions at the 5′ end and/or the 3′ end that are complementary to one or more overhangs created by nuclease-agent-mediated cleavage at the target genomic locus. For example, some nucleic acid constructs have short single-stranded regions at the 5′ end and/or the 3′ end that are complementary to one or more overhangs created by nuclease-mediated cleavage at 5′ and/or 3′ target sequences at the target genomic locus. Some such nucleic acid constructs have a complementary region only at the 5′ end or only at the 3′ end. For example, some such nucleic acid constructs have a complementary region only at the 5′ end complementary to an overhang created at a 5′ target sequence at the target genomic locus or only at the 3′ end complementary to an overhang created at a 3′ target sequence at the target genomic locus. Other such nucleic acid constructs have complementary regions at both the 5′ and 3′ ends. For example, other such nucleic acid constructs have complementary regions at both the 5′ and 3′ ends (e.g., complementary to first and second overhangs, respectively) generated by nuclease-mediated cleavage at the target genomic locus. For example, if the nucleic acid construct is double-stranded, the single-stranded complementary regions can extend from the 5′ end of the top strand of the nucleic acid construct and the 5′ end of the bottom strand of the donor nucleic acid, creating 5′ overhangs on each end. Alternatively, the single-stranded complementary region can extend from the 3′ end of the top strand of the nucleic acid construct and from the 3′ end of the bottom strand of the template, creating 3′ overhangs.

[0170] The complementary regions can be of any length sufficient to promote ligation between the nucleic acid construct and the target nucleic acid. Exemplary complementary regions are between about 1 to about 5 nucleotides in length, between about 1 to about 25 nucleotides in length, or between about 5 to about 150 nucleotides in length. For example, a complementary region can be at least about 1, 2, 3, 4, 5, 6, 7, 8, 9, 10, 11, 12, 13, 14, 15, 16, 17, 18, 19, 20, 21, 22, 23, 24, or 25 nucleotides in length. Alternatively, the complementary region can be about 5 to about 10, about 10 to about 20, about 20 to about 30, about 30 to about 40, about 40 to about 50, about 50 to about 60, about 60 to about 70, about 70 to about 80, about 80 to about 90, about 90 to about 100, about 100 to about 110, about 110 to about 120, about 120 to about 130, about 130 to about 140, about 140 to about 150 nucleotides in length, or longer.

[0171] Such complementary regions can be complementary to overhangs created by two pairs of nickases. Two double-strand breaks with staggered ends can be created by using first and second nickases that cleave opposite strands of DNA to create a first double-strand break, and third and fourth nickases that cleave opposite strands of DNA to create a second double-strand break. For example, a Cas protein can be used to nick first, second, third, and fourth guide RNA target sequences corresponding with first, second, third, and fourth guide RNAs. The first and second guide RNA target sequences can be positioned to create a first cleavage site such that the nicks created by the first and second nickases on the first and second strands of DNA create a double-strand break (i.e., the first cleavage site comprises the nicks within the first and second guide RNA target sequences). Likewise, the third and fourth guide RNA target sequences can be positioned to create a second cleavage site such that the nicks created by the third and fourth nickases on the first and second strands of DNA create a double-strand break (i.e., the second cleavage site comprises the nicks within the third and fourth guide RNA target sequences). The nicks within the first and second guide RNA target sequences and/or the third and fourth guide RNA target sequences can be off-set nicks that create overhangs. The offset window can be, for example, at least about 5 bp, 10 bp, 20 bp, 30 bp, 40 bp, 50 bp, 60 bp, 70 bp, 80 bp, 90 bp, 100 bp or more. See Ran et al. (2013) Cell 154:1380-1389; Mali et al. (2013) Nat. Biotechnol. 31:833-838; and Shen et al. (2014) Nat. Methods 11:399-404, each of which is herein incorporated by reference in its entirety for all purposes. In such cases, a double-stranded nucleic acid construct can be designed with single-stranded complementary regions that are complementary to the overhangs created by the nicks within the first and second guide RNA target sequences and by the nicks within the third and fourth guide RNA target sequences. Such nucleic acid construct can then be inserted by non-homologous-end-joining-mediated ligation.

[0172] Some of the nucleic acid constructs disclosed herein are bidirectional constructs that can be inserted into and expressed from the target genomic locus in either orientation. Such nucleic acid constructs can comprise a first segment comprising a first coding sequence for a first retinoschisin protein or fragment or variant thereof and a second segment comprising a reverse complement of a second coding sequence for a second retinoschisin protein or fragment or variant thereof. The second segment can be, for example, located 3′ of the first segment in the nucleic acid construct.

[0173] The first segment and the second segment can be linked directly together or can be linked by a linker such as a peptide linker. The peptide linker can be any suitable length. For example, the linker can be between about 5 to about 2000 nucleotides in length. As an example, the linker sequence can be about 1, 2, 3, 4, 5, 6, 7, 8, 9, 10, 11, 12, 13, 14, 15, 16, 17, 18, 19, 20, 25, 30, 35, 40, 45, 50, 55, 60, 65, 70, 75, 80, 85, 90, 95, 100, 150, 200, 250, 300, 500, 1000, 1500, 2000, or more nucleotides in length.

[0174] In some bidirectional constructs, the first retinoschisin protein or fragment or variant thereof is identical to the second retinoschisin protein or fragment or variant thereof. In other bidirectional constructs, the first retinoschisin protein or fragment or variant thereof is different from the second retinoschisin protein or fragment or variant thereof.

[0175] In some bidirectional constructs, the codon usage in the first coding sequence is the same as the codon usage in the second coding sequence. In other bidirectional constructs, the second coding sequence adopts a different codon usage from the codon usage of the first coding sequence in order to reduce hairpin formation. Such a reverse complement forms base pairs with fewer than all nucleotides of the coding sequence in the first segment, but it can optionally encode the same polypeptide.

[0176] The second segment can have any percentage of complementarity to the first segment. For example, the second segment sequence can have at least about 30%, at least about 35%, at least about 40%, at least about 45%, at least about 50%, at least about 55%, at least about 60%, at least about 65%, at least about 70%, at least about 75%, at least about 80%, at least about 85%, at least about 90%, at least about 95%, at least about 97%, or at least about 99% complementarity to the first segment. As another example, the second segment sequence can have less than about 30%, less than about 35%, less than about 40%, less than about 45%, less than about 50%, less than about 55%, less than about 60%, less than about 65%, less than about 70%, less than about 75%, less than about 80%, less than about 85%, less than about 90%, less than about 95%, less than about 97%, or less than about 99% complementarity to the first segment. The reverse complement of the second coding sequence can be, in some nucleic acid constructs, not substantially complementary (e.g., not more than 70% complementary) to the first coding sequence, not substantially complementary to a fragment of the first coding sequence, highly complementary (e.g., at least 90% complementary) to the first coding sequence, highly complementary to a fragment of the first coding sequence, about 50% to about 80% identical to the reverse complement of the first coding sequence, or about 60% to about 100% identical to the reverse complement of the first coding sequence.

[0177] The bidirectional constructs can, in some cases, comprise one or more (e.g., two) polyadenylation signal sequences. In some bidirectional constructs, the first segment can comprise a first polyadenylation signal sequence. In some bidirectional constructs, the first segment can comprise a second polyadenylation signal sequence. In some bidirectional constructs, the first segment can comprise a first polyadenylation signal sequence, and the second segment can comprise a second polyadenylation signal sequence (e.g., a reverse complement of a polyadenylation signal sequence). In some bidirectional constructs, the first segment can comprise a first polyadenylation signal sequence located 3′ of the first coding sequence. In some bidirectional constructs, the second segment can comprise a reverse complement of a second polyadenylation signal sequence located 5′ of the reverse complement of the second coding sequence. In some bidirectional constructs, the first segment can comprise a first polyadenylation signal sequence located 3′ of the first coding sequence, and the second segment can comprise a reverse complement of a second polyadenylation signal sequence located 5′ of the reverse complement of the second coding sequence. The first and second polyadenylation signal sequences can be the same or different. In one example, the first and second polyadenylation signals are different.

[0178] The bidirectional constructs can, in some cases, can comprise one or more (e.g., two) splice acceptor sites. In some bidirectional constructs, the first segment can comprise a first splice acceptor site. In some bidirectional constructs, the first segment can comprise a second splice acceptor site. In some bidirectional constructs, the first segment can comprise a first splice acceptor site, and the second segment can comprise a second splice acceptor site (e.g., a reverse complement of a splice acceptor site). In some bidirectional constructs, the first segment comprises a first splice acceptor site located 5′ of the first coding sequence. In some bidirectional constructs, the second segment comprises a reverse complement of a second splice acceptor site located 3′ of the reverse complement of the second coding sequence. In some bidirectional constructs, the first segment comprises a first splice acceptor site located 5′ of the first coding sequence, and the second segment comprises a reverse complement of a second splice acceptor site located 3′ of the reverse complement of the second coding sequence. The first and second splice acceptor sites can be the same or different. In one example, the first and second splice acceptor sites are different. The first and/or the second splice acceptor site can be from an RS1 gene (e.g., from intron 1 of an RS1 gene) such as a human RS1 gene.

[0179] Some bidirectional constructs can comprise a promoter that drives expression of the first retinoschisin protein or fragment or variant thereof and/or the reverse complement of a promoter that drives expression of the second retinoschisin protein or fragment or variant thereof. Alternatively, a bidirectional construct can be a construct that does not comprise a promoter that drives expression of the first retinoschisin protein or fragment or variant thereof or the second retinoschisin protein or fragment or variant thereof (i.e., a promoterless construct).

[0180] One or both of the coding sequences can be codon-optimized for expression in a host cell. In some bidirectional constructs, only one of the coding sequences is codon-optimized. In some bidirectional constructs, the first coding sequence is codon-optimized. In some bidirectional constructs, the second coding sequence is codon-optimized. In some bidirectional constructs, both coding sequences are codon-optimized.

[0181] In an exemplary bidirectional construct, the second segment is located 3′ of the first segment, both the first retinoschisin protein or fragment thereof and the second retinoschisin protein or fragment thereof are a human retinoschisin protein or fragment thereof, the first retinoschisin protein or fragment thereof is identical to the second retinoschisin protein or fragment thereof, both the first coding sequence and the second coding sequence comprise complementary DNA (cDNA) comprising exons 2-6 of human RS1 or degenerate variants thereof, the second coding sequence adopts a different codon usage from the codon usage of the first coding sequence, the first segment comprises a first polyadenylation signal sequence located 3′ of the first coding sequence, and the second segment comprises a reverse complement of a second polyadenylation signal sequence located 5′ of the reverse complement of the second coding sequence, the first segment comprises a first splice acceptor site located 5′ of the first coding sequence, and the second segment comprises a reverse complement of a second splice acceptor site located 3′ of the reverse complement of the second coding sequence, the nucleic acid construct does not comprise a promoter that drives expression of the first retinoschisin protein or fragment thereof or the second retinoschisin protein or fragment thereof, and optionally the nucleic acid construct does not comprise a homology arm.

[0182] In an exemplary bidirectional construct, the first retinoschisin protein or fragment thereof and/or the second retinoschisin protein or fragment thereof comprises, consists essentially of, or consists of a sequence at least about 90%, at least about 91%, at least about 92%, at least about 93%, at least about 94%, at least about 95%, at least about 96%, at least about 97%, at least about 98%, at least about 99%, or 100% identical to SEQ ID NO: 2 or 5. In an exemplary bidirectional construct, the first coding sequence and/or the second coding sequence comprises, consists essentially of, or consists of a sequence at least about 90%, at least about 91%, at least about 92%, at least about 93%, at least about 94%, at least about 95%, at least about 96%, at least about 97%, at least about 98%, at least about 99%, or 100% identical to SEQ ID NO: 6, 8, or 9 or degenerate variants thereof. In an exemplary bidirectional construct, the first coding sequence comprises, consists essentially of, or consists of a sequence at least about 90%, at least about 91%, at least about 92%, at least about 93%, at least about 94%, at least about 95%, at least about 96%, at least about 97%, at least about 98%, at least about 99%, or 100% identical to SEQ ID NO: 8, and the second coding sequence comprises, consists essentially of, or consists of a sequence at least about 90%, at least about 91%, at least about 92%, at least about 93%, at least about 94%, at least about 95%, at least about 96%, at least about 97%, at least about 98%, at least about 99%, or 100% identical to SEQ ID NO: 9. In an exemplary bidirectional construct, the nucleic acid construct comprises, consists essentially of, or consists of a sequence at least about 90%, at least about 91%, at least about 92%, at least about 93%, at least about 94%, at least about 95%, at least about 96%, at least about 97%, at least about 98%, at least about 99%, or 100% identical to SEQ ID NO: 46 or 47.

[0183] The nucleic acid constructs can include modifications or sequences that provide for additional desirable features (e.g., modified or regulated stability; tracking or detecting with a fluorescent label; a binding site for a protein or protein complex; and so forth). Nucleic acid constructs can comprise one or more fluorescent labels, purification tags, epitope tags, or a combination thereof. For example, a nucleic acid construct can comprise one or more fluorescent labels (e.g., fluorescent proteins or other fluorophores or dyes), such as at least 1, at least 2, at least 3, at least 4, or at least 5 fluorescent labels. Exemplary fluorescent labels include fluorophores such as fluorescein (e.g., 6-carboxyfluorescein (6-FAM)), Texas Red, HEX, Cy3, Cy5, Cy5.5, Pacific Blue, 5-(and-6)-carboxytetramethylrhodamine (TAMRA), and Cy7. A wide range of fluorescent dyes are available commercially for labeling oligonucleotides (e.g., from Integrated DNA Technologies). Such fluorescent labels (e.g., internal fluorescent labels) can be used, for example, to detect a nucleic acid construct that has been directly integrated into a cleaved target nucleic acid having protruding ends compatible with the ends of the nucleic acid construct. The label or tag can be at the 5′ end, the 3′ end, or internally within the nucleic acid construct. For example, a nucleic acid construct can be conjugated at 5′ end with the IR700 fluorophore from Integrated DNA Technologies (5′IRDYE®700).

[0184] The nucleic acid construct can also comprise a conditional allele. The conditional allele can be a multifunctional allele, as described in US 2011/0104799, herein incorporated by reference in its entirety for all purposes. For example, the conditional allele can comprise: (a) an actuating sequence in sense orientation with respect to transcription of a target gene; (b) a drug selection cassette (DSC) in sense or antisense orientation; (c) a nucleotide sequence of interest (NSI) in antisense orientation; and (d) a conditional by inversion module (COIN, which utilizes an exon-splitting intron and an invertible gene-trap-like module) in reverse orientation. See, e.g., US 2011/0104799. The conditional allele can further comprise recombinable units that recombine upon exposure to a first recombinase to form a conditional allele that (i) lacks the actuating sequence and the DSC; and (ii) contains the NSI in sense orientation and the COIN in antisense orientation. See, e.g., US 2011/0104799.

[0185] Nucleic acid constructs can also comprise a polynucleotide encoding a selection marker. Alternatively, the nucleic acid constructs can lack a polynucleotide encoding a selection marker. The selection marker can be contained in a selection cassette. Optionally, the selection cassette can be a self-deleting cassette. See, e.g., U.S. Pat. No. 8,697,851 and US 2013/0312129, each of which is herein incorporated by reference in its entirety for all purposes. As an example, the self-deleting cassette can comprise a Crei gene (comprises two exons encoding a Cre recombinase, which are separated by an intron) operably linked to a mouse Prm1 promoter and a neomycin resistance gene operably linked to a human ubiquitin promoter. By employing the Prm1 promoter, the self-deleting cassette can be deleted specifically in male germ cells of F0 animals. Exemplary selection markers include neomycin phosphotransferase (neo^{r}), hygromycin B phosphotransferase (hyg^{r}), puromycin-N-acetyltransferase (puro^{r}), blasticidin S deaminase (bsr^{r}), xanthine/guanine phosphoribosyl transferase (gpt), or herpes simplex virus thymidine kinase (HSV-k), or a combination thereof. The polynucleotide encoding the selection marker can be operably linked to a promoter active in a cell being targeted. Examples of promoters are described elsewhere herein.

[0186] The nucleic acid construct can also comprise a reporter gene. Exemplary reporter genes include those encoding luciferase, β-galactosidase, green fluorescent protein (GFP), enhanced green fluorescent protein (eGFP), cyan fluorescent protein (CFP), yellow fluorescent protein (YFP), enhanced yellow fluorescent protein (eYFP), blue fluorescent protein (BFP), enhanced blue fluorescent protein (eBFP), DsRed, ZsGreen, MmGFP, mPlum, mCherry, tdTomato, mStrawberry, J-Red, mOrange, mKO, mCitrine, Venus, YPet, Emerald, CyPet, Cerulean, T-Sapphire, and alkaline phosphatase. Such reporter genes can be operably linked to a promoter active in a cell being targeted. Examples of promoters are described elsewhere herein.

[0187] The nucleic acid construct can also comprise one or more expression cassettes or deletion cassettes. A given cassette can comprise one or more of a nucleotide sequence of interest, a polynucleotide encoding a selection marker, and a reporter gene, along with various regulatory components that influence expression. Examples of selectable markers and reporter genes that can be included are discussed in detail elsewhere herein.

[0188] The nucleic acid construct can comprise a nucleic acid flanked with site-specific recombination target sequences. Alternatively, the nucleic acid construct can comprise one or more site-specific recombination target sequences. Although the entire nucleic acid construct can be flanked by such site-specific recombination target sequences, any region or individual polynucleotide of interest within the nucleic acid construct can also be flanked by such sites. Site-specific recombination target sequences, which can flank the nucleic acid construct or any polynucleotide of interest in the nucleic acid construct can include, for example, loxP, lox511, lox2272, lox66, lox71, loxM2, lox5171, FRT, FRT11, FRT71, attp, att, FRT, rox, or a combination thereof. In one example, the site-specific recombination sites flank a polynucleotide encoding a selection marker and/or a reporter gene contained within the nucleic acid construct. Following integration of the nucleic acid construct at a targeted locus, the sequences between the site-specific recombination sites can be removed.

[0189] Nucleic acid constructs can also comprise one or more restriction sites for restriction endonucleases (i.e., restriction enzymes), which include Type I, Type II, Type III, and Type IV endonucleases. Type I and Type III restriction endonucleases recognize specific recognition sites, but typically cleave at a variable position from the nuclease binding site, which can be hundreds of base pairs away from the cleavage site (recognition site). In Type II systems the restriction activity is independent of any methylase activity, and cleavage typically occurs at specific sites within or near to the binding site. Most Type II enzymes cut palindromic sequences, however Type IIa enzymes recognize non-palindromic recognition sites and cleave outside of the recognition site, Type IIb enzymes cut sequences twice with both sites outside of the recognition site, and Type IIs enzymes recognize an asymmetric recognition site and cleave on one side and at a defined distance of about 1-20 nucleotides from the recognition site. Type IV restriction enzymes target methylated DNA. Restriction enzymes are further described and classified, for example in the REBASE database (webpage at rebase.neb.com; Roberts et al., (2003) Nucleic Acids Res. 31:418-420; Roberts et al., (2003) Nucleic Acids Res. 31:1805-1812; and Belfort et al. (2002) in Mobile DNA II, pp. 761-783, Eds. Craigie et al., (ASM Press, Washington, DC)).

[0190] The nucleic acid constructs disclosed herein can also comprise additional coding sequences. For example, some nucleic acid constructs disclosed herein can comprise a sequence encoding a guide RNA that targets the target genomic locus (e.g., that targets RS1, such as intron 1 of RS1). The sequence encoding the guide RNA can be operably linked to a promoter, such as a U6 promoter. In some nucleic acid constructs, the guide RNA expression cassette is located 3′ (downstream) of the retinoschisin coding sequence(s). In some bidirectional nucleic acid constructs, the guide RNA expression cassette is located between the first segment and the second segment.

### III. Vectors Comprising Nucleic Acid Constructs

[0191] Also provided herein are vectors comprising the nucleic acid constructs (i.e., exogenous donor nucleic acids) comprising a retinoschisin coding sequence (i.e., encoding a retinoschisin protein or fragment or variant thereof) for integration into and expression from a target genomic locus. Also provided herein are vectors comprising the nucleic acids encoding nuclease agents (e.g., targeting an endogenous RS1 locus) disclosed elsewhere herein. Also provided herein are vectors comprising the nucleic acid constructs and/or nucleic acids encoding nuclease agents (e.g., targeting an endogenous RS1 locus) disclosed elsewhere herein (e.g., vectors comprising the nucleic acid construct and a DNA encoding a guide RNA). A vector can comprise additional sequences such as, for example, replication origins, promoters, and genes encoding antibiotic resistance. Some such vectors comprise homology arms corresponding to target sites in the target genomic locus. Other such vectors do not comprise any homology arms.

[0192] Some vectors may be circular. Alternatively, the vector may be linear. The vector can be in the packaged for delivered via a lipid nanoparticle, liposome, non-lipid nanoparticle, or viral capsid. Non-limiting exemplary vectors include plasmids, phagemids, cosmids, artificial chromosomes, minichromosomes, transposons, viral vectors, and expression vectors.

[0193] The vectors can be, for example, viral vectors such as adeno-associated virus (AAV) vectors. The AAV may be any suitable serotype and may be a single-stranded AAV (ssAAV) or a self-complementary AAV (scAAV). Other exemplary viruses/viral vectors include retroviruses, adenoviruses, vaccinia viruses, poxviruses, and herpes simplex viruses. The viruses can infect dividing cells, non-dividing cells, or both dividing and non-dividing cells. The viruses can integrate into the host genome or alternatively do not integrate into the host genome. Such viruses can also be engineered to have reduced immunity. The viruses can be replication-competent or can be replication-defective (e.g., defective in one or more genes necessary for additional rounds of virion replication and/or packaging). Viruses can cause transient expression, long-lasting expression (e.g., at least 1 week, 2 weeks, 1 month, 2 months, or 3 months), or permanent expression (e.g., of Cas9 and/or gRNA). Exemplary viral titers (e.g., AAV titers) include 10¹², 10¹³, 10¹⁴, 10¹⁵, and 10¹⁶ vector genomes/mL. Exemplary viral titers (e.g., AAV titers) include about 10¹², about 10¹³, about 10¹⁴, about 10¹⁵, and about 10¹⁶ vector genomes (vg)/mL, or between about 10¹² to about 10¹⁶, between about 10¹² to about 10¹⁵, between about 10¹² to about 10¹⁴, between about 10¹² to about 10¹³, between about 10¹³ to about 10¹⁶, between about 10¹⁴ to about 10¹⁶, between about 10¹⁵ to about 10¹⁶, or between about 10¹³ to about 10¹⁵ vg/mL. Other exemplary viral titers (e.g., AAV titers) include about 10¹², about 10¹³, about 10¹⁴, about 10¹⁵, and about 10¹⁶ vector genomes (vg)/kg of body weight, or between about 10¹² to about 10¹⁶, between about 10¹² to about 10¹⁵, between about 10¹² to about 10¹⁴, between about 10¹² to about 10¹³, between about 10¹³ to about 10¹⁶, between about 10¹⁴ to about 10¹⁶, between about 10¹⁵ to about 10¹⁶, or between about 10¹³ to about 10¹⁵ vg/kg of body weight.

[0194] The ssDNA AAV genome consists of two open reading frames, Rep and Cap, flanked by two inverted terminal repeats that allow for synthesis of the complementary DNA strand. When constructing an AAV transfer plasmid, the transgene is placed between the two ITRs, and Rep and Cap can be supplied in trans. In addition to Rep and Cap, AAV can require a helper plasmid containing genes from adenovirus. These genes (E4, E2a, and VA) mediate AAV replication. For example, the transfer plasmid, Rep/Cap, and the helper plasmid can be transfected into HEK293 cells containing the adenovirus gene E1+ to produce infectious AAV particles. Alternatively, the Rep, Cap, and adenovirus helper genes may be combined into a single plasmid. Similar packaging cells and methods can be used for other viruses, such as retroviruses.

[0195] Multiple serotypes of AAV have been identified. These serotypes differ in the types of cells they infect (i.e., their tropism), allowing preferential transduction of specific cell types. Serotypes for photoreceptor cells include AAV2, AAV5, and AAV8. Serotypes for retinal pigment epithelium tissue include AAV1, AAV2, AAV4, AAV5, and AAV8. In a specific example, the AAV vector comprising the nucleic acid construct can be AAV2, AAV5, or AAV8.

[0196] Tropism can be further refined through pseudotyping, which is the mixing of a capsid and a genome from different viral serotypes. For example AAV2/5 indicates a virus containing the genome of serotype 2 packaged in the capsid from serotype 5. Use of pseudotyped viruses can improve transduction efficiency, as well as alter tropism. Hybrid capsids derived from different serotypes can also be used to alter viral tropism. For example, AAV-DJ contains a hybrid capsid from eight serotypes and displays high infectivity across a broad range of cell types in vivo. AAV-DJ8 is another example that displays the properties of AAV-DJ but with enhanced brain uptake. AAV serotypes can also be modified through mutations. Examples of mutational modifications of AAV2 include Y444F, Y500F, Y730F, and S662V. Examples of mutational modifications of AAV3 include Y705F, Y731F, and T492V. Examples of mutational modifications of AAV6 include S663V and T492V. Other pseudotyped/modified AAV variants include AAV2/1, AAV2/6, AAV2/7, AAV2/8, AAV2/9, AAV2.5, AAV8.2, and AAV/SASTG. In a specific example, the AAV is AAV7m8, an AAV variant that mediates highly efficient delivery to all retinal layers and to photoreceptors. See, e.g., Dalkara et al. (2013) Sci. Transl. Med. 5:189ra76, herein incorporated by reference in its entirety for all purposes.

[0197] To accelerate transgene expression, self-complementary AAV (scAAV) variants can be used. Because AAV depends on the cell's DNA replication machinery to synthesize the complementary strand of the AAV's single-stranded DNA genome, transgene expression may be delayed. To address this delay, scAAV containing complementary sequences that are capable of spontaneously annealing upon infection can be used, eliminating the requirement for host cell DNA synthesis. However, single-stranded AAV (ssAAV) vectors can also be used.

[0198] To increase packaging capacity, longer transgenes may be split between two AAV transfer plasmids, the first with a 3′ splice donor and the second with a 5′ splice acceptor. Upon co-infection of a cell, these viruses form concatemers, are spliced together, and the full-length transgene can be expressed. Although this allows for longer transgene expression, expression is less efficient. Similar methods for increasing capacity utilize homologous recombination. For example, a transgene can be divided between two transfer plasmids but with substantial sequence overlap such that co-expression induces homologous recombination and expression of the full-length transgene.

### IV. Lipid Nanoparticles Comprising Nucleic Acid Constructs

[0199] Also provided herein are lipid nanoparticles comprising the nucleic acid constructs (i.e., exogenous donor nucleic acids) comprising a retinoschisin coding sequence (i.e., encoding a retinoschisin protein or fragment or variant thereof) for integration into and expression from a target genomic locus. Also provided herein are lipid nanoparticles comprising the nucleic acids encoding nuclease agents (e.g., targeting an endogenous RS1 locus) disclosed elsewhere herein. Also provided herein are lipid nanoparticles comprising the nucleic acid constructs and the nucleic acids encoding nuclease agents (e.g., targeting an endogenous RS1 locus) disclosed elsewhere herein.

[0200] Lipid formulations can protect biological molecules from degradation while improving their cellular uptake. Lipid nanoparticles are particles comprising a plurality of lipid molecules physically associated with each other by intermolecular forces. These include microspheres (including unilamellar and multilamellar vesicles, e.g., liposomes), a dispersed phase in an emulsion, micelles, or an internal phase in a suspension. Such lipid nanoparticles can be used to encapsulate one or more nucleic acids or proteins for delivery. Formulations which contain cationic lipids are useful for delivering polyanions such as nucleic acids. Other lipids that can be included are neutral lipids (i.e., uncharged or zwitterionic lipids), anionic lipids, helper lipids that enhance transfection, and stealth lipids that increase the length of time for which nanoparticles can exist in vivo. Examples of suitable cationic lipids, neutral lipids, anionic lipids, helper lipids, and stealth lipids can be found in WO 2016/010840 A1 and WO 2017/173054 A1, each of which is herein incorporated by reference in its entirety for all purposes. An exemplary lipid nanoparticle can comprise a cationic lipid and one or more other components. In one example, the other component can comprise a helper lipid such as cholesterol. In another example, the other components can comprise a helper lipid such as cholesterol and a neutral lipid such as DSPC. In another example, the other components can comprise a helper lipid such as cholesterol, an optional neutral lipid such as DSPC, and a stealth lipid such as S010, S024, S027, S031, or S033.

[0201] The LNP may contain one or more or all of the following: (i) a lipid for encapsulation and for endosomal escape; (ii) a neutral lipid for stabilization; (iii) a helper lipid for stabilization; and (iv) a stealth lipid. See, e.g., Finn et al. (2018) Cell Rep. 22(9):2227-2235 and WO 2017/173054 A1, each of which is herein incorporated by reference in its entirety for all purposes. In certain LNPs, the cargo can further comprise a nuclease agent. In certain LNPs, the cargo can further comprise a guide RNA or a nucleic acid encoding a guide RNA. In certain LNPs, the cargo can further comprise an mRNA encoding a Cas nuclease, such as Cas9, and a guide RNA or a nucleic acid encoding a guide RNA. In certain LNPs, the cargo can include an mRNA encoding a Cas nuclease, such as Cas9, a guide RNA or a nucleic acid encoding a guide RNA, and the nucleic acid construct.

[0202] The lipid for encapsulation and endosomal escape can be a cationic lipid. The lipid can also be a biodegradable lipid, such as a biodegradable ionizable lipid. One example of a suitable lipid is Lipid A or LP01, which is (9Z,12Z)-3-((4,4-bis(octyloxy)butanoyl)oxy)-2-((((3-(diethylamino)propoxy)carbonyl)oxy)methyl)propyl octadeca-9,12-dienoate, also called 3-((4,4-bis(octyloxy)butanoyl)oxy)-2-((((3-(diethylamino)propoxy)carbonyl)oxy)methyl)propyl (9Z,12Z)-octadeca-9,12-dienoate. See, e.g., Finn et al. (2018) Cell Rep. 22(9):2227-2235 and WO 2017/173054 A1, each of which is herein incorporated by reference in its entirety for all purposes. Another example of a suitable lipid is Lipid B, which is ((5-((dimethylamino)methyl)-1,3-phenylene)bis(oxy))bis(octane-8,1-diyl)bis(decanoate), also called ((5-((dimethylamino)methyl)-1,3-phenylene)bis(oxy))bis(octane-8,1-diyl)bis(decanoate). Another example of a suitable lipid is Lipid C, which is 2-((4-(((3-(dimethylamino)propoxy)carbonyl)oxy)hexadecanoyl)oxy)propane-1,3-diyl(9Z,9′Z,12Z,12′Z)-bis(octadeca-9,12-dienoate). Another example of a suitable lipid is Lipid D, which is 3-(((3-(dimethylamino)propoxy)carbonyl)oxy)-13-(octanoyloxy)tridecyl 3-octylundecanoate. Other suitable lipids include heptatriaconta-6,9,28,31-tetraen-19-yl 4-(dimethylamino)butanoate (also known as Dlin-MC3-DMA (MC3))).

[0203] Some such lipids suitable for use in the LNPs described herein are biodegradable in vivo. For example, LNPs comprising such a lipid include those where at least 75% of the lipid is cleared from the plasma within 8, 10, 12, 24, or 48 hours, or 3, 4, 5, 6, 7, or 10 days. As another example, at least 50% of the LNP is cleared from the plasma within 8, 10, 12, 24, or 48 hours, or 3, 4, 5, 6, 7, or 10 days.

[0204] Such lipids may be ionizable depending upon the pH of the medium they are in. For example, in a slightly acidic medium, the lipids may be protonated and thus bear a positive charge. Conversely, in a slightly basic medium, such as, for example, blood where pH is approximately 7.35, the lipids may not be protonated and thus bear no charge. In some embodiments, the lipids may be protonated at a pH of at least about 9, 9.5, or 10. The ability of such a lipid to bear a charge is related to its intrinsic pKa. For example, the lipid may, independently, have a pKa in the range of from about 5.8 to about 6.2.

[0205] Neutral lipids function to stabilize and improve processing of the LNPs. Examples of suitable neutral lipids include a variety of neutral, uncharged or zwitterionic lipids. Examples of neutral phospholipids suitable for use in the present disclosure include, but are not limited to, 5-heptadecylbenzene-1,3-diol (resorcinol), dipalmitoylphosphatidylcholine (DPPC), distearoylphosphatidylcholine (DSPC), phosphocholine (DOPC), dimyristoylphosphatidylcholine (DMPC), phosphatidylcholine (PLPC), 1,2-distearoyl-sn-glycero-3-phosphocholine (DAPC), phosphatidylethanolamine (PE), egg phosphatidylcholine (EPC), dilauryloylphosphatidylcholine (DLPC), dimyristoylphosphatidylcholine (DMPC), 1-myristoyl-2-palmitoyl phosphatidylcholine (MPPC), 1-palmitoyl-2-myristoyl phosphatidylcholine (PMPC), 1-palmitoyl-2-stearoyl phosphatidylcholine (PSPC), 1,2-diarachidoyl-sn-glycero-3-phosphocholine (DBPC), 1-stearoyl-2-palmitoyl phosphatidylcholine (SPPC), 1,2-dieicosenoyl-sn-glycero-3-phosphocholine (DEPC), palmitoyloleoyl phosphatidylcholine (POPC), lysophosphatidyl choline, dioleoyl phosphatidylethanolamine (DOPE), dilinoleoylphosphatidylcholine distearoylphosphatidylethanolamine (DSPE), dimyristoyl phosphatidylethanolamine (DMPE), dipalmitoyl phosphatidylethanolamine (DPPE), palmitoyloleoyl phosphatidylethanolamine (POPE), lysophosphatidylethanolamine, and combinations thereof. For example, the neutral phospholipid may be selected from the group consisting of distearoylphosphatidylcholine (DSPC) and dimyristoyl phosphatidyl ethanolamine (DMPE).

[0206] Helper lipids include lipids that enhance transfection. The mechanism by which the helper lipid enhances transfection can include enhancing particle stability. In certain cases, the helper lipid can enhance membrane fusogenicity. Helper lipids include steroids, sterols, and alkyl resorcinols. Examples of suitable helper lipids suitable include cholesterol, 5-heptadecylresorcinol, and cholesterol hemisuccinate. In one example, the helper lipid may be cholesterol or cholesterol hemisuccinate.

[0207] Stealth lipids include lipids that alter the length of time the nanoparticles can exist in vivo. Stealth lipids may assist in the formulation process by, for example, reducing particle aggregation and controlling particle size. Stealth lipids may modulate pharmacokinetic properties of the LNP. Suitable stealth lipids include lipids having a hydrophilic head group linked to a lipid moiety.

[0208] The hydrophilic head group of stealth lipid can comprise, for example, a polymer moiety selected from polymers based on PEG (sometimes referred to as poly(ethylene oxide)), poly(oxazoline), poly(vinyl alcohol), poly(glycerol), poly(N-vinylpyrrolidone), polyaminoacids, and poly N-(2-hydroxypropyl)methacrylamide. The term PEG means any polyethylene glycol or other polyalkylene ether polymer. In certain LNP formulations, the PEG, is a PEG-2K, also termed PEG 2000, which has an average molecular weight of about 2,000 daltons. See, e.g., WO 2017/173054 A1, herein incorporated by reference in its entirety for all purposes.

[0209] The lipid moiety of the stealth lipid may be derived, for example, from diacylglycerol or diacylglycamide, including those comprising a dialkylglycerol or dialkylglycamide group having alkyl chain length independently comprising from about C4 to about C40 saturated or unsaturated carbon atoms, wherein the chain may comprise one or more functional groups such as, for example, an amide or ester. The dialkylglycerol or dialkylglycamide group can further comprise one or more substituted alkyl groups.

[0210] As one example, the stealth lipid may be selected from PEG-dilauroylglycerol, PEG-dimyristoylglycerol (PEG-DMG), PEG-dipalmitoylglycerol, PEG-distearoylglycerol (PEG-DSPE), PEG-dilaurylglycamide, PEG-dimyristylglycamide, PEG-dipalmitoylglycamide, and PEG-distearoylglycamide, PEG-cholesterol (1-[8′-(Cholest-5-en-3[beta]-oxy)carboxamido-3′,6′-dioxaoctanyl]carbamoyl-[omega]-methyl-poly(ethylene glycol), PEG-DMB (3,4-ditetradecoxylbenzyl-[omega]-methyl-poly(ethylene glycol)ether), 1,2-dimyristoyl-sn-glycero-3-phosphoethanolamine-N-[methoxy(polyethylene glycol)-2000](PEG2k-DMG), 1,2-distearoyl-sn-glycero-3-phosphoethanolamine-N-[methoxy(polyethylene glycol)-2000](PEG2k-DSPE), 1,2-distearoyl-sn-glycerol, methoxypoly ethylene glycol (PEG2k-DSG), poly(ethylene glycol)-2000-dimethacrylate (PEG2k-DMA), and 1,2-distearyloxypropyl-3-amine-N-[methoxy(polyethylene glycol)-2000](PEG2k-DSA). In one particular example, the stealth lipid may be PEG2k-DMG.

[0211] The LNPs can comprise different respective molar ratios of the component lipids in the formulation. The mol-% of the CCD lipid may be, for example, from about 30 mol-% to about 60 mol-%, from about 35 mol-% to about 55 mol-%, from about 40 mol-% to about 50 mol-%, from about 42 mol-% to about 47 mol %, or about 45%. The mol-% of the helper lipid may be, for example, from about 30 mol-% to about 60 mol-%, from about 35 mol-% to about 55 mol-%, from about 40 mol-% to about 50 mol-%, from about 41 mol-% to about 46 mol-%, or about 44 mol-%. The mol-% of the neutral lipid may be, for example, from about 1 mol-% to about 20 mol-%, from about 5 mol-% to about 15 mol-%, from about 7 mol-% to about 12 mol-%, or about 9 mol-%. The mol-% of the stealth lipid may be, for example, from about 1 mol-% to about 10 mol-%, from about 1 mol-% to about 5 mol-%, from about 1 mol-% to about 3 mol-%, about 2 mol-%, or about 1 mol-%.

[0212] The LNPs can have different ratios between the positively charged amine groups of the biodegradable lipid (N) and the negatively charged phosphate groups (P) of the nucleic acid to be encapsulated. This may be mathematically represented by the equation N/P. For example, the N/P ratio may be from about 0.5 to about 100, from about 1 to about 50, from about 1 to about 25, from about 1 to about 10, from about 1 to about 7, from about 3 to about 5, from about 4 to about 5, about 4, about 4.5, or about 5.

[0213] In some LNPs, the cargo can comprise Cas mRNA and gRNA. The Cas mRNA and gRNAs can be in different ratios. For example, the LNP formulation can include a ratio of Cas mRNA to gRNA nucleic acid ranging from about 25:1 to about 1:25, ranging from about 10:1 to about 1:10, ranging from about 5:1 to about 1:5, or about 1:1. Alternatively, the LNP formulation can include a ratio of Cas mRNA to gRNA nucleic acid from about 1:1 to about 1:5, or about 10:1. Alternatively, the LNP formulation can include a ratio of Cas mRNA to gRNA nucleic acid of about 1:10, 25:1, 10:1, 5:1, 3:1, 1:1, 1:3, 1:5, 1:10, or 1:25. Alternatively, the LNP formulation can include a ratio of Cas mRNA to gRNA nucleic acid of from about 1:1 to about 1:2. In specific examples, the ratio of Cas mRNA to gRNA can be about 1:1 or about 1:2.

[0214] Exemplary dosing of LNPs includes about 0.1, about 0.25, about 0.3, about 0.5, about 1, about 2, about 3, about 4, about 5, about 6, about 8, or about 10 mg/kg body weight (mpk) or about 0.1 to about 10, about 0.25 to about 10, about 0.3 to about 10, about 0.5 to about 10, about 1 to about 10, about 2 to about 10, about 3 to about 10, about 4 to about 10, about 5 to about 10, about 6 to about 10, about 8 to about 10, about 0.1 to about 8, about 0.1 to about 6, about 0.1 to about 5, about 0.1 to about 4, about 0.1 to about 3, about 0.1 to about 2, about 0.1 to about 1, about 0.1 to about 0.5, about 0.1 to about 0.3, about 0.1 to about 0.25, about 0.25 to about 8, about 0.3 to about 6, about 0.5 to about 5, about 1 to about 5, or about 2 to about 3 mg/kg body weight with respect to total RNA (Cas9 mRNA and gRNA) cargo content. Such LNPs can be administered, for example, intravenously. In one example, LNP doses between about 0.01 mg/kg and about 10 mg/kg, between about 0.1 and about 10 mg/kg, or between about 0.01 and about 0.3 mg/kg can be used. For example, LNP doses of about 0.01, about 0.03, about 0.1, about 0.3, about 1, about 3, or about 10 mg/kg can be used. Additional exemplary dosing of LNPs includes about 0.1, about 0.25, about 0.3, about 0.5, about 1, about 2, about 3, about 4, about 5, about 6, about 8, or about 10 mg/kg (mpk) body weight or about 0.1 to about 10, about 0.25 to about 10, about 0.3 to about 10, about 0.5 to about 10, about 1 to about 10, about 2 to about 10, about 3 to about 10, about 4 to about 10, about 5 to about 10, about 6 to about 10, about 8 to about 10, about 0.1 to about 8, about 0.1 to about 6, about 0.1 to about 5, about 0.1 to about 4, about 0.1 to about 3, about 0.1 to about 2, about 0.1 to about 1, about 0.1 to about 0.5, about 0.1 to about 0.3, about 0.1 to about 0.25, about 0.25 to about 8, about 0.3 to about 6, about 0.5 to about 5, about 1 to about 5, or about 2 to about 3 mg/kg body weight with respect to total RNA (Cas9 mRNA and gRNA) cargo content. Such LNPs can be administered, for example, intravenously. In one example, LNP doses between about 0.01 mg/kg and about 10 mg/kg, between about 0.1 and about 10 mg/kg, or between about 0.01 and about 0.3 mg/kg can be used. For example, LNP doses of about 0.01, about 0.03, about 0.1, about 0.3, about 0.5, about 1, about 2, about 3, or about 10 mg/kg can be used. In another example, LNP doses between about 0.5 and about 10, between about 0.5 and about 5, between about 0.5 and about 3, between about 1 and about 10, between about 1 and about 5, between about 1 and about 3, or between about 1 and about 2 mg/kg can be used.

### V. Compositions Comprising Nucleic Acid Constructs and/or a Nuclease Agent or a Nucleic Acid Encoding a Nuclease Agent

[0215] Also provided herein are compositions comprising the nucleic acid constructs comprising a retinoschisin coding sequence (i.e., encoding a retinoschisin protein or fragment or variant thereof) for integration into and expression from a target genomic locus, vectors, or lipid nanoparticles disclosed herein and a nuclease agent or a nucleic acid encoding the nuclease agent. Also provided herein are compositions comprising the nucleic acid constructs comprising a retinoschisin coding sequence (i.e., encoding a retinoschisin protein or fragment or variant thereof) for integration into and expression from a target genomic locus, vectors, or lipid nanoparticles disclosed herein. Also provided herein are compositions comprising a nuclease agent or a nucleic acid encoding the nuclease agent (e.g., wherein the nuclease agent targets a RS1 gene or locus) or vectors or lipid nanoparticles comprising the nuclease agent or the nucleic acid encoding the nuclease agent. Such compositions can be, for example, for use in expressing retinoschisin in a cell or for use in integrating a coding sequence for a retinoschisin protein or fragment or variant thereof into a target genomic locus in a cell. Such compositions can also be, for example, for use in treating a subject with X-linked juvenile retinoschisis (XLRS). Such compositions can comprise a nucleic acid construct comprising the coding sequence for the retinoschisin protein or fragment thereof for integration into the target genomic locus (or a vector or lipid nanoparticle comprising the nucleic acid construct) and a nuclease agent or a nucleic acid encoding the nuclease agent, wherein the nuclease agent targets a nuclease target sequence in the target genomic locus. The nuclease agent can be a CRISPR/Cas system (e.g., a Cas protein and a guide RNA) or any other suitable nuclease agent. Examples of suitable nuclease agents are provided below.

### A. CRISPR/Cas Systems

[0216] The methods and compositions disclosed herein can utilize Clustered Regularly Interspersed Short Palindromic Repeats (CRISPR)/CRISPR-associated (Cas) systems or components of such systems to modify a genome within a cell (e.g., an RS1 locus). CRISPR/Cas systems include transcripts and other elements involved in the expression of, or directing the activity of, Cas genes. A CRISPR/Cas system can be, for example, a type I, a type II, a type III system, or a type V system (e.g., subtype V-A or subtype V-B). The methods and compositions disclosed herein can employ CRISPR/Cas systems by utilizing CRISPR complexes (comprising a guide RNA (gRNA) complexed with a Cas protein) for site-directed binding or cleavage of nucleic acids.

[0217] CRISPR/Cas systems used in the compositions and methods disclosed herein can be non-naturally occurring. A “non-naturally occurring” system includes anything indicating the involvement of the hand of man, such as one or more components of the system being altered or mutated from their naturally occurring state, being at least substantially free from at least one other component with which they are naturally associated in nature or being associated with at least one other component with which they are not naturally associated. For example, some CRISPR/Cas systems employ non-naturally occurring CRISPR complexes comprising a gRNA and a Cas protein that do not naturally occur together, employ a Cas protein that does not occur naturally, or employ a gRNA that does not occur naturally.

### 1. Cas Proteins

[0218] Cas proteins generally comprise at least one RNA recognition or binding domain that can interact with guide RNAs. Cas proteins can also comprise nuclease domains (e.g., DNase domains or RNase domains), DNA-binding domains, helicase domains, protein-protein interaction domains, dimerization domains, and other domains. Some such domains (e.g., DNase domains) can be from a native Cas protein. Other such domains can be added to make a modified Cas protein. A nuclease domain possesses catalytic activity for nucleic acid cleavage, which includes the breakage of the covalent bonds of a nucleic acid molecule. Cleavage can produce blunt ends or staggered ends, and it can be single-stranded or double-stranded. For example, a wild type Cas9 protein will typically create a blunt cleavage product. Alternatively, a wild type Cpf1 protein (e.g., FnCpf1) can result in a cleavage product with a 5-nucleotide 5′ overhang, with the cleavage occurring after the 18th base pair from the PAM sequence on the non-targeted strand and after the 23rd base on the targeted strand. A Cas protein can have full cleavage activity to create a double-strand break at a target genomic locus (e.g., a double-strand break with blunt ends), or it can be a nickase that creates a single-strand break at a target genomic locus.

[0219] Examples of Cas proteins include Cas1, Cas1B, Cas2, Cas3, Cas4, Cas5, Cas5e (CasD), Cas6, Cas6e, Cas6f, Cas7, Cas8al, Cas8a2, Cas8b, Cas8c, Cas9 (Csn1 or Csx12), Cas10, Cas10d, CasF, CasG, CasH, Csy1, Csy2, Csy3, Cse1 (CasA), Cse2 (CasB), Cse3 (CasE), Cse4 (CasC), Csc1, Csc2, Csa5, Csn2, Csm2, Csm3, Csm4, Csm5, Csm6, Cmr1, Cmr3, Cmr4, Cmr5, Cmr6, Csb1, Csb2, Csb3, Csx17, Csx14, Csx10, Csx16, CsaX, Csx3, Csx1, Csx15, Csf1, Csf2, Csf3, Csf4, and Cu1966, and homologs or modified versions thereof.

[0220] An exemplary Cas protein is a Cas9 protein or a protein derived from a Cas9 protein. Cas9 proteins are from a type II CRISPR/Cas system and typically share four key motifs with a conserved architecture. Motifs 1, 2, and 4 are RuvC-like motifs, and motif 3 is an HNH motif. Exemplary Cas9 proteins are from Streptococcus pyogenes, Streptococcus thermophilus, Streptococcus sp., Staphylococcus aureus, Nocardiopsis dassonvillei, Streptomyces pristinaespiralis, Streptomyces viridochromogenes, Streptomyces viridochromogenes, Streptosporangium roseum, Streptosporangium roseum, Alicyclobacillus acidocaldarius, Bacillus pseudomycoides, Bacillus selenitireducens, Exiguobacterium sibiricum, Lactobacillus delbrueckii, Lactobacillus salivarius, Microscilla marina, Burkholderiales bacterium, Polaromonas naphthalenivorans, Polaromonas sp., Crocosphaera watsonii, Cyanothece sp., Microcystis aeruginosa, Synechococcus sp., Acetohalobium arabaticum, Ammonifex degensii, Caldicelulosiruptor becscii, Candidatus Desulforudis, Clostridium botulinum, Clostridium difficile, Finegoldia magna, Natranaerobius thermophilus, Pelotomaculum thermopropionicum, Acidithiobacillus caldus, Acidithiobacillus ferrooxidans, Allochromatium vinosum, Marinobacter sp., Nitrosococcus halophilus, Nitrosococcus watsoni, Pseudoalteromonas haloplanktis, Ktedonobacter racemifer, Methanohalobium evestigatum, Anabaena variabilis, Nodularia spumigena, Nostoc sp., Arthrospira maxima, Arthrospira platensis, Arthrospira sp., Lyngbya sp., Microcoleus chthonoplastes, Oscillatoria sp., Petrotoga mobilis, Thermosipho africanus, Acaryochloris marina, Neisseria meningitidis, or Campylobacter jejuni. Additional examples of the Cas9 family members are described in WO 2014/131833, herein incorporated by reference in its entirety for all purposes. Cas9 from S. pyogenes (SpCas9) (e.g., assigned UniProt accession number Q99ZW2) is an exemplary Cas9 protein. An exemplary SpCas9 protein sequence is set forth in SEQ ID NO: 27 (encoded by the DNA sequence set forth in SEQ ID NO: 26). An exemplary SpCas9 cDNA sequence is set forth in SEQ ID NO: 28. Smaller Cas9 proteins (e.g., Cas9 proteins whose coding sequences are compatible with the maximum AAV packaging capacity when combined with a guide RNA coding sequence and regulatory elements for the Cas9 and guide RNA, such as SaCas9 and CjCas9 and Nme2Cas9) are other exemplary Cas9 proteins. For example, Cas9 from S. aureus (SaCas9) (e.g., assigned UniProt accession number J7RUA5) is another exemplary Cas9 protein. Likewise, Cas9 from Campylobacter jejuni (CjCas9) e.g., (assigned UniProt accession number Q0P897) is another exemplary Cas9 protein. See, e.g., Kim et al. (2017) Nat. Commun. 8:14500, herein incorporated by reference in its entirety for all purposes. SaCas9 is smaller than SpCas9, and CjCas9 is smaller than both SaCas9 and SpCas9. Cas9 from Neisseria meningitidis (Nme2Cas9) is another exemplary Cas9 protein. See, e.g., Edraki et al. (2019) Mol. Cell 73(4):714-726, herein incorporated by reference in its entirety for all purposes. Cas9 proteins from Streptococcus thermophilus (e.g., Streptococcus thermophilus LMD-9 Cas9 encoded by the CRISPR1 locus (St1Cas9) or Streptococcus thermophilus Cas9 from the CRISPR3 locus (St3Cas9)) are other exemplary Cas9 proteins. Cas9 from Francisella novicida (FnCas9) or the RHA Francisella novicida Cas9 variant that recognizes an alternative PAM (E1369R/E1449H/R1556A substitutions) are other exemplary Cas9 proteins. These and other exemplary Cas9 proteins are reviewed, e.g., in Cebrian-Serrano and Davies (2017) Mamm. Genome 28(7):247-261, herein incorporated by reference in its entirety for all purposes. Examples of Cas9 coding sequences, Cas9 mRNAs, and Cas9 protein sequences are provided in WO 2013/176772, WO 2014/065596, WO 2016/106121, and WO 2019/067910, each of which is herein incorporated by reference in its entirety for all purposes. Specific examples of ORFs and Cas9 amino acid sequences are provided in Table 30 at paragraph [0449] WO 2019/067910, and specific examples of Cas9 mRNAs and ORFs are provided in paragraphs [0214]-[0234] of WO 2019/067910. As one example, a Cas9 protein can comprise, consist essentially of, or consist of the sequence set forth in SEQ ID NO: 6242. Such a Cas9 protein can be encoded by a mRNA comprising, consisting essentially of, or consisting of SEQ ID NO: 6243. As another example, a Cas9 protein can comprise, consist essentially of, or consist of the sequence set forth in SEQ ID NO: 6246. Such a Cas9 protein can be encoded by a mRNA comprising, consisting essentially of, or consisting of SEQ ID NO: 6245.

[0221] Another example of a Cas protein is a Cpf1 (CRISPR from Prevotella and Francisella 1) protein. Cpf1 is a large protein (about 1300 amino acids) that contains a RuvC-like nuclease domain homologous to the corresponding domain of Cas9 along with a counterpart to the characteristic arginine-rich cluster of Cas9. However, Cpf1 lacks the HNH nuclease domain that is present in Cas9 proteins, and the RuvC-like domain is contiguous in the Cpf1 sequence, in contrast to Cas9 where it contains long inserts including the HNH domain. See, e.g., Zetsche et al. (2015) Cell 163(3):759-771, herein incorporated by reference in its entirety for all purposes. Exemplary Cpf1 proteins are from Francisella tularensis 1, Francisella tularensis subsp. novicida, Prevotella albensis, Lachnospiraceae bacterium MC2017 1, Butyrivibrio proteoclasticus, Peregrinibacteria bacterium GW2011_GWA2_33_10, Parcubacteria bacterium GW2011_GWC2_44_17, Smithella sp. SCADC, Acidaminococcus sp. BV3L6, Lachnospiraceae bacterium MA 2020, Candidatus Methanoplasma termitum, Eubacterium eligens, Moraxella bovoculi 237, Leptospira inadai, Lachnospiraceae bacterium ND2006, Porphyromonas crevioricanis 3, Prevotella disiens, and Porphyromonas macacae. Cpf1 from Francisella novicida U112 (FnCpf1; assigned UniProt accession number A0Q7Q2) is an exemplary Cpf1 protein.

[0222] Cas proteins can be wild type proteins (i.e., those that occur in nature), modified Cas proteins (i.e., Cas protein variants), or fragments of wild type or modified Cas proteins. Cas proteins can also be active variants or fragments with respect to catalytic activity of wild type or modified Cas proteins. Active variants or fragments with respect to catalytic activity can comprise at least 80%, 85%, 90%, 91%, 92%, 93%, 94%, 95%, 96%, 97%, 98%, 99% or more sequence identity to the wild type or modified Cas protein or a portion thereof, wherein the active variants retain the ability to cut at a desired cleavage site and hence retain nick-inducing or double-strand-break-inducing activity. Assays for nick-inducing or double-strand-break-inducing activity are known and generally measure the overall activity and specificity of the Cas protein on DNA substrates containing the cleavage site.

[0223] Cas proteins can be modified to increase or decrease one or more of nucleic acid binding affinity, nucleic acid binding specificity, and enzymatic activity. Cas proteins can also be modified to change any other activity or property of the protein, such as stability. For example, one or more nuclease domains of the Cas protein can be modified, deleted, or inactivated, or a Cas protein can be truncated to remove domains that are not essential for the function of the protein or to optimize (e.g., enhance or reduce) the activity of or a property of the Cas protein.

[0224] One example of a modified Cas protein is the modified SpCas9-HF1 protein, which is a high-fidelity variant of Streptococcus pyogenes Cas9 harboring alterations (N497A/R661A/Q695A/Q926A) designed to reduce non-specific DNA contacts. See, e.g., Kleinstiver et al. (2016) Nature 529(7587):490-495, herein incorporated by reference in its entirety for all purposes. Another example of a modified Cas protein is the modified eSpCas9 variant (K848A/K1003A/R1060A) designed to reduce off-target effects. See, e.g., Slaymaker et al. (2016) Science 351(6268):84-88, herein incorporated by reference in its entirety for all purposes. Other SpCas9 variants include K855A and K810A/K1003A/R1060A. These and other modified Cas proteins are reviewed, e.g., in Cebrian-Serrano and Davies (2017) Mamm. Genome 28(7):247-261, herein incorporated by reference in its entirety for all purposes. Another example of a modified Cas9 protein is xCas9, which is a SpCas9 variant that can recognize an expanded range of PAM sequences. See, e.g., Hu et al. (2018) Nature 556:57-63, herein incorporated by reference in its entirety for all purposes.

[0225] Cas proteins can comprise at least one nuclease domain, such as a DNase domain. For example, a wild type Cpf1 protein generally comprises a RuvC-like domain that cleaves both strands of target DNA, perhaps in a dimeric configuration. Cas proteins can also comprise at least two nuclease domains, such as DNase domains. For example, a wild type Cas9 protein generally comprises a RuvC-like nuclease domain and an HN-like nuclease domain. The RuvC and HNH domains can each cut a different strand of double-stranded DNA to make a double-stranded break in the DNA. See, e.g., Jinek et al. (2012) Science 337:816-821, herein incorporated by reference in its entirety for all purposes.

[0226] One or more or all of the nuclease domains can be deleted or mutated so that they are no longer functional or have reduced nuclease activity. For example, if one of the nuclease domains is deleted or mutated in a Cas9 protein, the resulting Cas9 protein can be referred to as a nickase and can generate a single-strand break within a double-stranded target DNA but not a double-strand break (i.e., it can cleave the complementary strand or the non-complementary strand, but not both). If both of the nuclease domains are deleted or mutated, the resulting Cas protein (e.g., Cas9) will have a reduced ability to cleave both strands of a double-stranded DNA (e.g., a nuclease-null or nuclease-inactive Cas protein, or a catalytically dead Cas protein (dCas)). If none of the nuclease domains is deleted or mutated in a Cas9 protein, the Cas9 protein will retain double-strand-break-inducing activity. An example of a mutation that converts Cas9 into a nickase is a D10A (aspartate to alanine at position 10 of Cas9) mutation in the RuvC domain of Cas9 from S. pyogenes. Likewise, H939A (histidine to alanine at amino acid position 839), H840A (histidine to alanine at amino acid position 840), or N863A (asparagine to alanine at amino acid position N863) in the HNH domain of Cas9 from S. pyogenes can convert the Cas9 into a nickase. Other examples of mutations that convert Cas9 into a nickase include the corresponding mutations to Cas9 from S. thermophilus. See, e.g., Sapranauskas et al. (2011) Nucleic Acids Res. 39(21):9275-9282 and WO 2013/141680, each of which is herein incorporated by reference in its entirety for all purposes. Such mutations can be generated using methods such as site-directed mutagenesis, PCR-mediated mutagenesis, or total gene synthesis. Examples of other mutations creating nickases can be found, for example, in WO 2013/176772 and WO 2013/142578, each of which is herein incorporated by reference in its entirety for all purposes. If all of the nuclease domains are deleted or mutated in a Cas protein (e.g., both of the nuclease domains are deleted or mutated in a Cas9 protein), the resulting Cas protein (e.g., Cas9) will have a reduced ability to cleave both strands of a double-stranded DNA (e.g., a nuclease-null or nuclease-inactive Cas protein). One specific example is a D10A/H840A S. pyogenes Cas9 double mutant or a corresponding double mutant in a Cas9 from another species when optimally aligned with S. pyogenes Cas9. Another specific example is a D10A/N863A S. pyogenes Cas9 double mutant or a corresponding double mutant in a Cas9 from another species when optimally aligned with S. pyogenes Cas9.

[0227] Examples of inactivating mutations in the catalytic domains of xCas9 are the same as those described above for SpCas9. Examples of inactivating mutations in the catalytic domains of Staphylococcus aureus Cas9 proteins are also known. For example, the Staphylococcus aureus Cas9 enzyme (SaCas9) may comprise a substitution at position N580 (e.g., N580A substitution) and a substitution at position D10 (e.g., D10A substitution) to generate a nuclease-inactive Cas protein. See, e.g., WO 2016/106236, herein incorporated by reference in its entirety for all purposes. Examples of inactivating mutations in the catalytic domains of Nme2Cas9 are also known (e.g., combination of D16A and H588A). Examples of inactivating mutations in the catalytic domains of St1Cas9 are also known (e.g., combination of D9A, D598A, H599A, and N622A). Examples of inactivating mutations in the catalytic domains of St3Cas9 are also known (e.g., combination of D10A and N870A). Examples of inactivating mutations in the catalytic domains of CjCas9 are also known (e.g., combination of D8A and H559A). Examples of inactivating mutations in the catalytic domains of FnCas9 and RHA FnCas9 are also known (e.g., N995A).

[0228] Examples of inactivating mutations in the catalytic domains of Cpf1 proteins are also known. With reference to Cpf1 proteins from Francisella novicida U112 (FnCpf1), Acidaminococcus sp. BV3L6 (AsCpf1), Lachnospiraceae bacterium ND2006 (LbCpf1), and Moraxella bovoculi 237 (MbCpf1 Cpf1), such mutations can include mutations at positions 908, 993, or 1263 of AsCpf1 or corresponding positions in Cpf1 orthologs, or positions 832, 925, 947, or 1180 of LbCpf1 or corresponding positions in Cpf1 orthologs. Such mutations can include, for example one or more of mutations D908A, E993A, and D1263A of AsCpf1 or corresponding mutations in Cpf1 orthologs, or D832A, E925A, D947A, and D1180A of LbCpf1 or corresponding mutations in Cpf1 orthologs. See, e.g., US 2016/0208243, herein incorporated by reference in its entirety for all purposes.

[0229] Cas proteins can also be operably linked to heterologous polypeptides as fusion proteins. For example, a Cas protein can be fused to a cleavage domain or an epigenetic modification domain. See WO 2014/089290, herein incorporated by reference in its entirety for all purposes. Cas proteins can also be fused to a heterologous polypeptide providing increased or decreased stability. The fused domain or heterologous polypeptide can be located at the N-terminus, the C-terminus, or internally within the Cas protein.

[0230] As one example, a Cas protein can be fused to one or more heterologous polypeptides that provide for subcellular localization. Such heterologous polypeptides can include, for example, one or more nuclear localization signals (NLS) such as the monopartite SV40 NLS and/or a bipartite alpha-importin NLS for targeting to the nucleus, a mitochondrial localization signal for targeting to the mitochondria, an ER retention signal, and the like. See, e.g., Lange et al. (2007) J. Biol. Chem. 282(8):5101-5105, herein incorporated by reference in its entirety for all purposes. Such subcellular localization signals can be located at the N-terminus, the C-terminus, or anywhere within the Cas protein. An NLS can comprise a stretch of basic amino acids and can be a monopartite sequence or a bipartite sequence. Optionally, a Cas protein can comprise two or more NLSs, including an NLS (e.g., an alpha-importin NLS or a monopartite NLS) at the N-terminus and an NLS (e.g., an SV40 NLS or a bipartite NLS) at the C-terminus. A Cas protein can also comprise two or more NLSs at the N-terminus and/or two or more NLSs at the C-terminus.

[0231] A Cas protein may, for example, be fused with 1-10 NLSs (e.g., fused with 1-5 NLSs or fused with one NLS. Where one NLS is used, the NLS may be linked at the N-terminus or the C-terminus of the Cas protein sequence. It may also be inserted within the Cas protein sequence. Alternatively, the Cas protein may be fused with more than one NLS. For example, the Cas protein may be fused with 2, 3, 4, or 5 NLSs. In a specific example, the Cas protein may be fused with two NLSs. In certain circumstances, the two NLSs may be the same (e.g., two SV40 NLSs) or different. For example, the Cas protein can be fused to two SV40 NLS sequences linked at the carboxy terminus. Alternatively, the Cas protein may be fused with two NLSs, one linked at the N-terminus and one at the C-terminus. In other examples, the Cas protein may be fused with 3 NLSs or with no NLS. The NLS may be a monopartite sequence, such as, e.g., the SV40 NLS, PKKKRKV (SEQ ID NO: 49) or PKKKRRV (SEQ ID NO: 50). The NLS may be a bipartite sequence, such as the NLS of nucleoplasmin, KRPAATKKAGQAKKKK (SEQ ID NO: 51). In a specific example, a single PKKKRKV (SEQ ID NO: 49) NLS may be linked at the C-terminus of the Cas protein. One or more linkers are optionally included at the fusion site.

[0232] Cas proteins can also be operably linked to a cell-penetrating domain or protein transduction domain. For example, the cell-penetrating domain can be derived from the HIV-1 TAT protein, the TLM cell-penetrating motif from human hepatitis B virus, MPG, Pep-1, VP22, a cell penetrating peptide from Herpes simplex virus, or a polyarginine peptide sequence. See, e.g., WO 2014/089290 and WO 2013/176772, each of which is herein incorporated by reference in its entirety for all purposes. The cell-penetrating domain can be located at the N-terminus, the C-terminus, or anywhere within the Cas protein.

[0233] Cas proteins can also be operably linked to a heterologous polypeptide for ease of tracking or purification, such as a fluorescent protein, a purification tag, or an epitope tag. Examples of fluorescent proteins include green fluorescent proteins (e.g., GFP, GFP-2, tagGFP, turboGFP, eGFP, Emerald, Azami Green, Monomeric Azami Green, CopGFP, AceGFP, ZsGreenl), yellow fluorescent proteins (e.g., YFP, eYFP, Citrine, Venus, YPet, PhiYFP, ZsYellowl), blue fluorescent proteins (e.g., eBFP, eBFP2, Azurite, mKalamal, GFPuv, Sapphire, T-sapphire), cyan fluorescent proteins (e.g., eCFP, Cerulean, CyPet, AmCyanl, Midoriishi-Cyan), red fluorescent proteins (e.g., mKate, mKate2, mPlum, DsRed monomer, mCherry, mRFP1, DsRed-Express, DsRed2, DsRed-Monomer, HcRed-Tandem, HcRedl, AsRed2, eqFP611, mRaspberry, mStrawberry, Jred), orange fluorescent proteins (e.g., mOrange, mKO, Kusabira-Orange, Monomeric Kusabira-Orange, mTangerine, tdTomato), and any other suitable fluorescent protein. Examples of tags include glutathione-S-transferase (GST), chitin binding protein (CBP), maltose binding protein, thioredoxin (TRX), poly(NANP), tandem affinity purification (TAP) tag, myc, AcV5, AUl, AU5, E, ECS, E2, FLAG, hemagglutinin (HA), nus, Softag 1, Softag 3, Strep, SBP, Glu-Glu, HSV, KT3, S, S1, T7, V5, VSV-G, histidine (His), biotin carboxyl carrier protein (BCCP), and calmodulin.

[0234] Cas proteins can also be tethered to labeled nucleic acids or donor sequences. Such tethering (i.e., physical linking) can be achieved through covalent interactions or noncovalent interactions, and the tethering can be direct (e.g., through direct fusion or chemical conjugation, which can be achieved by modification of cysteine or lysine residues on the protein or intein modification) or can be achieved through one or more intervening linkers or adapter molecules such as streptavidin or aptamers. See, e.g., Pierce et al. (2005) Mini Rev. Med. Chem. 5(1):41-55; Duckworth et al. (2007) Angew. Chem. Int. Ed. Engl. 46(46):8819-8822; Schaeffer and Dixon (2009) Australian J. Chem. 62(10):1328-1332; Goodman et al. (2009) Chembiochem. 10(9):1551-1557; and Khatwani et al. (2012) Bioorg. Med. Chem. 20(14):4532-4539, each of which is herein incorporated by reference in its entirety for all purposes. Noncovalent strategies for synthesizing protein-nucleic acid conjugates include biotin-streptavidin and nickel-histidine methods. Covalent protein-nucleic acid conjugates can be synthesized by connecting appropriately functionalized nucleic acids and proteins using a wide variety of chemistries. Some of these chemistries involve direct attachment of the oligonucleotide to an amino acid residue on the protein surface (e.g., a lysine amine or a cysteine thiol), while other more complex schemes require post-translational modification of the protein or the involvement of a catalytic or reactive protein domain. Methods for covalent attachment of proteins to nucleic acids can include, for example, chemical cross-linking of oligonucleotides to protein lysine or cysteine residues, expressed protein-ligation, chemoenzymatic methods, and the use of photoaptamers. The labeled nucleic acid or donor sequence can be tethered to the C-terminus, the N-terminus, or to an internal region within the Cas protein. In one example, the labeled nucleic acid or donor sequence is tethered to the C-terminus or the N-terminus of the Cas protein. Likewise, the Cas protein can be tethered to the 5′ end, the 3′ end, or to an internal region within the labeled nucleic acid or donor sequence. That is, the labeled nucleic acid or donor sequence can be tethered in any orientation and polarity. For example, the Cas protein can be tethered to the 5′ end or the 3′ end of the labeled nucleic acid or donor sequence.

[0235] Cas proteins can be provided in any form. For example, a Cas protein can be provided in the form of a protein, such as a Cas protein complexed with a gRNA. Alternatively, a Cas protein can be provided in the form of a nucleic acid encoding the Cas protein, such as an RNA (e.g., messenger RNA (mRNA)) or DNA. Optionally, the nucleic acid encoding the Cas protein can be codon optimized for efficient translation into protein in a particular cell or organism. For example, the nucleic acid encoding the Cas protein can be modified to substitute codons having a higher frequency of usage in a bacterial cell, a yeast cell, a human cell, a non-human cell, a mammalian cell, a rodent cell, a mouse cell, a rat cell, or any other host cell of interest, as compared to the naturally occurring polynucleotide sequence. When a nucleic acid encoding the Cas protein is introduced into the cell, the Cas protein can be transiently, conditionally, or constitutively expressed in the cell.

[0236] Cas proteins provided as mRNAs can be modified for improved stability and/or immunogenicity properties. The modifications may be made to one or more nucleosides within the mRNA. Examples of chemical modifications to mRNA nucleobases include pseudouridine, 1-methyl-pseudouridine, and 5-methyl-cytidine. For example, capped and polyadenylated Cas mRNA containing N1-methyl pseudouridine can be used. Likewise, Cas mRNAs can be modified by depletion of uridine using synonymous codons.

[0237] Nucleic acids encoding Cas proteins can be stably integrated in the genome of a cell and operably linked to a promoter active in the cell. Alternatively, nucleic acids encoding Cas proteins can be operably linked to a promoter in an expression construct. Expression constructs include any nucleic acid constructs capable of directing expression of a gene or other nucleic acid sequence of interest (e.g., a Cas gene) and which can transfer such a nucleic acid sequence of interest to a target cell. For example, the nucleic acid encoding the Cas protein can be in a vector comprising a DNA encoding a gRNA. Alternatively, it can be in a vector or plasmid that is separate from the vector comprising the DNA encoding the gRNA. Promoters that can be used in an expression construct include promoters active, for example, in one or more of a eukaryotic cell, a human cell, a non-human cell, a mammalian cell, a non-human mammalian cell, a rodent cell, a mouse cell, a rat cell, a pluripotent cell, an embryonic stem (ES) cell, an adult stem cell, a developmentally restricted progenitor cell, an induced pluripotent stem (iPS) cell, or a one-cell stage embryo. Such promoters can be, for example, conditional promoters, inducible promoters, constitutive promoters, or tissue-specific promoters. Optionally, the promoter can be a bidirectional promoter driving expression of both a Cas protein in one direction and a guide RNA in the other direction. Such bidirectional promoters can consist of (1) a complete, conventional, unidirectional Pol III promoter that contains 3 external control elements: a distal sequence element (DSE), a proximal sequence element (PSE), and a TATA box; and (2) a second basic Pol III promoter that includes a PSE and a TATA box fused to the 5′ terminus of the DSE in reverse orientation. For example, in the H1 promoter, the DSE is adjacent to the PSE and the TATA box, and the promoter can be rendered bidirectional by creating a hybrid promoter in which transcription in the reverse direction is controlled by appending a PSE and TATA box derived from the U6 promoter. See, e.g., US 2016/0074535, herein incorporated by references in its entirety for all purposes. Use of a bidirectional promoter to express genes encoding a Cas protein and a guide RNA simultaneously allow for the generation of compact expression cassettes to facilitate delivery.

[0238] Different promoters can be used to drive Cas expression or Cas9 expression. In some methods, small promoters are used so that the Cas or Cas9 coding sequence can fit into an AAV construct. For example, Cas or Cas9 and one or more gRNAs (e.g., 1 gRNA or 2 gRNAs or 3 gRNAs or 4 gRNAs) can be delivered via LNP-mediated delivery (e.g., in the form of RNA) or adeno-associated virus (AAV)-mediated delivery (e.g., AAV2-mediated delivery, AAV5-mediated delivery, AAV8-mediated delivery, or AAV7m8-mediated delivery). For example, the nuclease agent can be CRISPR/Cas9, and a Cas9 mRNA and a gRNA targeting an endogenous RS1 locus (e.g., intron 1 of RS1) can be delivered via LNP-mediated delivery, or a DNA encoding Cas9 and a DNA encoding a gRNA targeting an endogenous RS1 locus (e.g., intron 1 of RS1) can be delivered via AAV-mediated delivery. The Cas or Cas9 and the gRNA(s) can be delivered in a single AAV or via two separate AAVs. For example, a first AAV can carry a Cas or Cas9 expression cassette, and a second AAV can carry a gRNA expression cassette. Similarly, a first AAV can carry a Cas or Cas9 expression cassette, and a second AAV can carry two or more gRNA expression cassettes. Alternatively, a single AAV can carry a Cas or Cas9 expression cassette (e.g., Cas or Cas9 coding sequence operably linked to a promoter) and a gRNA expression cassette (e.g., gRNA coding sequence operably linked to a promoter). Similarly, a single AAV can carry a Cas or Cas9 expression cassette (e.g., Cas or Cas9 coding sequence operably linked to a promoter) and two or more gRNA expression cassettes (e.g., gRNA coding sequences operably linked to promoters). Different promoters can be used to drive expression of the gRNA, such as a U6 promoter or the small tRNA Gln. Likewise, different promoters can be used to drive Cas9 expression. For example, small promoters are used so that the Cas9 coding sequence can fit into an AAV construct. Similarly, small Cas9 proteins (e.g., SaCas9 or CjCas9 are used to maximize the AAV packaging capacity).

[0239] Cas proteins provided as mRNAs can be modified for improved stability and/or immunogenicity properties. The modifications may be made to one or more nucleosides within the mRNA. Examples of chemical modifications to mRNA nucleobases include pseudouridine, 1-methyl-pseudouridine, and 5-methyl-cytidine. mRNA encoding Cas proteins can also be capped. The cap can be, for example, a cap 1 structure in which the +1 ribonucleotide is methylated at the 2′O position of the ribose. The capping can, for example, give superior activity in vivo (e.g., by mimicking a natural cap), can result in a natural structure that reduce stimulation of the innate immune system of the host (e.g., can reduce activation of pattern recognition receptors in the innate immune system). mRNA encoding Cas proteins can also be polyadenylated (to comprise a poly(A) tail). mRNA encoding Cas proteins can also be modified to include pseudouridine (e.g., can be fully substituted with pseudouridine). As another example, capped and polyadenylated Cas mRNA containing N1-methyl pseudouridine can be used. As another example, Cas mRNA fully substituted with pseudouridine can be used (i.e., all standard uracil residues are replaced with pseudouridine, a uridine isomer in which the uracil is attached with a carbon-carbon bond rather than nitrogen-carbon). Likewise, Cas mRNAs can be modified by depletion of uridine using synonymous codons. For example, capped and polyadenylated Cas mRNA fully substituted with pseudouridine can be used.

[0240] Cas mRNAs can comprise a modified uridine at least at one, a plurality of, or all uridine positions. The modified uridine can be a uridine modified at the 5 position (e.g., with a halogen, methyl, or ethyl). The modified uridine can be a pseudouridine modified at the 1 position (e.g., with a halogen, methyl, or ethyl). The modified uridine can be, for example, pseudouridine, N1-methyl-pseudouridine, 5-methoxyuridine, 5-iodouridine, or a combination thereof. In some examples, the modified uridine is 5-methoxyuridine. In some examples, the modified uridine is 5-iodouridine. In some examples, the modified uridine is pseudouridine. In some examples, the modified uridine is N1-methyl-pseudouridine. In some examples, the modified uridine is a combination of pseudouridine and N1-methyl-pseudouridine. In some examples, the modified uridine is a combination of pseudouridine and 5-methoxyuridine. In some examples, the modified uridine is a combination of N1-methyl pseudouridine and 5-methoxyuridine. In some examples, the modified uridine is a combination of 5-iodouridine and N1-methyl-pseudouridine. In some examples, the modified uridine is a combination of pseudouridine and 5-iodouridine. In some examples, the modified uridine is a combination of 5-iodouridine and 5-methoxyuridine.

[0241] Cas mRNAs disclosed herein can also comprise a 5′ cap, such as a Cap0, Cap1, or Cap2. A 5′ cap is generally a 7-methylguanine ribonucleotide (which may be further modified, e.g., with respect to ARCA) linked through a 5′-triphosphate to the 5′ position of the first nucleotide of the 5′-to-3′ chain of the mRNA (i.e., the first cap-proximal nucleotide). In Cap0, the riboses of the first and second cap-proximal nucleotides of the mRNA both comprise a 2′-hydroxyl. In Cap1, the riboses of the first and second transcribed nucleotides of the mRNA comprise a 2′-methoxy and a 2′-hydroxyl, respectively. In Cap2, the riboses of the first and second cap-proximal nucleotides of the mRNA both comprise a 2′-methoxy. See, e.g., Katibah et al. (2014) Proc. Natl. Acad. Sci. U.S.A. 111(33):12025-30 and Abbas et al. (2017) Proc. Natl. Acad. Sci. U.S.A. 114(11):E2106-E2115, each of which is herein incorporated by reference in its entirety for all purposes. Most endogenous higher eukaryotic mRNAs, including mammalian mRNAs such as human mRNAs, comprise Cap1 or Cap2. Cap0 and other cap structures differing from Cap1 and Cap2 may be immunogenic in mammals, such as humans, due to recognition as non-self by components of the innate immune system such as IFIT-1 and IFIT-5, which can result in elevated cytokine levels including type I interferon. Components of the innate immune system such as IFIT-1 and IFIT-5 may also compete with eIF4E for binding of an mRNA with a cap other than Cap1 or Cap2, potentially inhibiting translation of the mRNA.

[0242] A cap can be included co-transcriptionally. For example, ARCA (anti-reverse cap analog; Thermo Fisher Scientific Cat. No. AM8045) is a cap analog comprising a 7-methylguanine 3′-methoxy-5′-triphosphate linked to the 5′ position of a guanine ribonucleotide which can be incorporated in vitro into a transcript at initiation. ARCA results in a Cap0 cap in which the 2′ position of the first cap-proximal nucleotide is hydroxyl. See, e.g., Stepinski et al. (2001) RNA 7:1486-1495, herein incorporated by reference in its entirety for all purposes.

[0243] CleanCap™ AG (m7G(5′)ppp(5′)(2′OMeA)pG; TriLink Biotechnologies Cat. No. N-7113) or CleanCap™ GG (m7G(5′)ppp(5′)(2′OMeG)pG; TriLink Biotechnologies Cat. No. N-7133) can be used to provide a Cap1 structure co-transcriptionally. 3′-O-methylated versions of CleanCap™ AG and CleanCap™ GG are also available from TriLink Biotechnologies as Cat. Nos. N-7413 and N-7433, respectively.

[0244] Alternatively, a cap can be added to an RNA post-transcriptionally. For example, Vaccinia capping enzyme is commercially available (New England Biolabs Cat. No. M2080S) and has RNA triphosphatase and guanylyltransferase activities, provided by its D1 subunit, and guanine methyltransferase, provided by its D12 subunit. As such, it can add a 7-methylguanine to an RNA, so as to give Cap0, in the presence of S-adenosyl methionine and GTP. See, e.g., Guo and Moss (1990) Proc. Natl. Acad. Sci. U.S.A. 87:4023-4027 and Mao and Shuman (1994) J. Biol. Chem. 269:24472-24479, each of which is herein incorporated by reference in its entirety for all purposes.

[0245] Cas mRNAs can further comprise a poly-adenylated (poly-A or poly(A) or poly-adenine) tail. The poly-A tail can, for example, comprise at least 20, at least 30, at least 40, at least 50, at least 60, at least 70, at least 80, at least 90, or at least 100 adenines, and optionally up to 300 adenines. For example, the poly-A tail can comprise 95, 96, 97, 98, 99, or 100 adenine nucleotides.

### 2. Guide RNAs

[0246] A “guide RNA” or “gRNA” is an RNA molecule that binds to a Cas protein (e.g., Cas9 protein) and targets the Cas protein to a specific location within a target DNA. Guide RNAs can comprise two segments: a “DNA-targeting segment” (also called “guide sequence”) and a “protein-binding segment.” “Segment” includes a section or region of a molecule, such as a contiguous stretch of nucleotides in an RNA. Some gRNAs, such as those for Cas9, can comprise two separate RNA molecules: an “activator-RNA” (e.g., tracrRNA) and a “targeter-RNA” (e.g., CRISPR RNA or crRNA). Other gRNAs are a single RNA molecule (single RNA polynucleotide), which can also be called a “single-molecule gRNA,” a “single-guide RNA,” or an “sgRNA.” See, e.g., WO 2013/176772, WO 2014/065596, WO 2014/089290, WO 2014/093622, WO 2014/099750, WO 2013/142578, and WO 2014/131833, each of which is herein incorporated by reference in its entirety for all purposes. A guide RNA can refer to either a CRISPR RNA (crRNA) or the combination of a crRNA and a trans-activating CRISPR RNA (tracrRNA). The crRNA and tracrRNA can be associated as a single RNA molecule (single guide RNA or sgRNA) or in two separate RNA molecules (dual guide RNA or dgRNA). For Cas9, for example, a single-guide RNA can comprise a crRNA fused to a tracrRNA (e.g., via a linker). For Cpf1, for example, only a crRNA is needed to achieve binding to and/or cleavage of a target sequence. The terms “guide RNA” and “gRNA” include both double-molecule (i.e., modular) gRNAs and single-molecule gRNAs. In some of the methods and compositions disclosed herein, a gRNA is a S. pyogenes Cas9 gRNA or an equivalent thereof. In some of the methods and compositions disclosed herein, a gRNA is a S. aureus Cas9 gRNA or an equivalent thereof.

[0247] An exemplary two-molecule gRNA comprises a crRNA-like (“CRISPR RNA” or “targeter-RNA” or “crRNA” or “crRNA repeat”) molecule and a corresponding tracrRNA-like (“trans-activating CRISPR RNA” or “activator-RNA” or “tracrRNA”) molecule. A crRNA comprises both the DNA-targeting segment (single-stranded) of the gRNA and a stretch of nucleotides (i.e., the crRNA tail) that forms one half of the dsRNA duplex of the protein-binding segment of the gRNA. An example of a crRNA tail, located downstream (3′) of the DNA-targeting segment, comprises, consists essentially of, or consists of GUUUUAGAGCUAUGCU (SEQ ID NO: 29) or GUUUUAGAGCUAUGCUGUUUUG (SEQ ID NO: 52). Any of the DNA-targeting segments disclosed herein can be joined to the 5′ end of SEQ ID NO: 29 or 52 to form a crRNA.

[0248] A corresponding tracrRNA (activator-RNA) comprises a stretch of nucleotides that forms the other half of the dsRNA duplex of the protein-binding segment of the gRNA. A stretch of nucleotides of a crRNA are complementary to and hybridize with a stretch of nucleotides of a tracrRNA to form the dsRNA duplex of the protein-binding domain of the gRNA. As such, each crRNA can be said to have a corresponding tracrRNA. Exemplary tracrRNA sequences comprise, consist essentially of, or consist of

(SEQ ID NO: 30)
AGCAUAGCAAGUUAAAAUAAGGCUAGUCCGUUAUCAACUUGAAAAAGUG
GCACCGAGUCGGUGCUUU,
(SEQ ID NO: 31)
AAACAGCAUAGCAAGUUAAAAUAAGGCUAGUCCGUUAUCAACUUGAAAAG
AGUGCACCGAGUCGGUGCUUUU,
or
(SEQ ID NO: 32)
GUUGGAACCAUUCAAAACAGCAUAGCAAGUUAAAAUAAGGCUAGUCCGUU
AUCAACUUGAAAAAGUGGCACCGAGUCGGUGC.

[0249] In systems in which both a crRNA and a tracrRNA are needed, the crRNA and the corresponding tracrRNA hybridize to form a gRNA. In systems in which only a crRNA is needed, the crRNA can be the gRNA. The crRNA additionally provides the single-stranded DNA-targeting segment that hybridizes to the complementary strand of a target DNA. If used for modification within a cell, the exact sequence of a given crRNA or tracrRNA molecule can be designed to be specific to the species in which the RNA molecules will be used. See, e.g., Mali et al. (2013) Science 339(6121):823-826; Jinek et al. (2012) Science 337(6096):816-821; Hwang et al. (2013) Nat. Biotechnol. 31(3):227-229; Jiang et al. (2013) Nat. Biotechnol. 31(3):233-239; and Cong et al. (2013) Science 339(6121):819-823, each of which is herein incorporated by reference in its entirety for all purposes.

[0250] The DNA-targeting segment (crRNA) of a given gRNA comprises a nucleotide sequence that is complementary to a sequence on the complementary strand of the target DNA, as described in more detail below. The DNA-targeting segment of a gRNA interacts with the target DNA in a sequence-specific manner via hybridization (i.e., base pairing). As such, the nucleotide sequence of the DNA-targeting segment may vary and determines the location within the target DNA with which the gRNA and the target DNA will interact. The DNA-targeting segment of a subject gRNA can be modified to hybridize to any desired sequence within a target DNA. Naturally occurring crRNAs differ depending on the CRISPR/Cas system and organism but often contain a targeting segment of between 21 to 72 nucleotides length, flanked by two direct repeats (DR) of a length of between 21 to 46 nucleotides (see, e.g., WO 2014/131833, herein incorporated by reference in its entirety for all purposes). In the case of S. pyogenes, the DRs are 36 nucleotides long and the targeting segment is 30 nucleotides long. The 3′ located DR is complementary to and hybridizes with the corresponding tracrRNA, which in turn binds to the Cas protein.

[0251] The DNA-targeting segment can have, for example, a length of at least about 12, at least about 15, at least about 17, at least about 18, at least about 19, at least about 20, at least about 25, at least about 30, at least about 35, or at least about 40 nucleotides. Such DNA-targeting segments can have, for example, a length from about 12 to about 100, from about 12 to about 80, from about 12 to about 50, from about 12 to about 40, from about 12 to about 30, from about 12 to about 25, or from about 12 to about 20 nucleotides. For example, the DNA targeting segment can be from about 15 to about 25 nucleotides (e.g., from about 17 to about 20 nucleotides, or about 17, 18, 19, or 20 nucleotides). See, e.g., US 2016/0024523, herein incorporated by reference in its entirety for all purposes. For Cas9 from S. pyogenes, a typical DNA-targeting segment is between 16 and 20 nucleotides in length or between 17 and 20 nucleotides in length. For Cas9 from S. aureus, a typical DNA-targeting segment is between 21 and 23 nucleotides in length. For Cpf1, a typical DNA-targeting segment is at least 16 nucleotides in length or at least 18 nucleotides in length.

[0252] In one example, the DNA-targeting segment can be about 20 nucleotides in length. However, shorter and longer sequences can also be used for the targeting segment (e.g., 15-25 nucleotides in length, such as 15, 16, 17, 18, 19, 20, 21, 22, 23, 24, or 25 nucleotides in length). The degree of identity between the DNA-targeting segment and the corresponding guide RNA target sequence (or degree of complementarity between the DNA-targeting segment and the other strand of the guide RNA target sequence) can be, for example, about 75%, about 80%, about 85%, about 90%, about 95%, about 96%, about 97%, about 98%, about 99%, or about 100%. The DNA-targeting segment and the corresponding guide RNA target sequence can contain one or more mismatches. For example, the DNA-targeting segment of the guide RNA and the corresponding guide RNA target sequence can contain 1-4, 1-3, 1-2, 1, 2, 3, or 4 mismatches (e.g., where the total length of the guide RNA target sequence is at least 17, at least 18, at least 19, or at least 20 or more nucleotides). For example, the DNA-targeting segment of the guide RNA and the corresponding guide RNA target sequence can contain 1-4, 1-3, 1-2, 1, 2, 3, or 4 mismatches where the total length of the guide RNA target sequence 20 nucleotides.

[0253] As one example, a guide RNA targeting an RS1 gene can comprise a DNA-targeting segment (i.e., guide sequence) comprising, consisting essentially of, or consisting of the sequence (DNA-targeting segment) set forth in any one of SEQ ID NOS: 3148-6241. Alternatively, a guide RNA targeting an RS1 gene can comprise a DNA-targeting segment comprising, consisting essentially of, or consisting of at least 17, at least 18, at least 19, or at least 20 contiguous nucleotides of the sequence (DNA-targeting segment) set forth in any one of SEQ ID NOS: 3148-6241. Alternatively, a guide RNA targeting an RS1 gene can comprise a DNA-targeting segment that is at least 75%, at least 80%, at least 85%, at least 90%, at least 91%, at least 92%, at least 93%, at least 94%, at least 95%, at least 96%, at least 97%, at least 98%, or at least 99% identical to the sequence (DNA-targeting segment) set forth in any one of SEQ ID NOS: 3148-6241. Alternatively, a guide RNA targeting an RS1 gene can comprise a DNA-targeting segment that is at least 90%, at least 91%, at least 92%, at least 93%, at least 94%, at least 95%, at least 96%, at least 97%, at least 98%, or at least 99% identical to the sequence (DNA-targeting segment) set forth in any one of SEQ ID NOS: 3148-6241. Alternatively, a guide RNA targeting an RS1 gene can comprise a DNA-targeting segment that is at least 75%, at least 80%, at least 85%, at least 90%, at least 91%, at least 92%, at least 93%, at least 94%, at least 95%, at least 96%, at least 97%, at least 98%, or at least 99% identical to at least 17, at least 18, at least 19, or at least 20 contiguous nucleotides of the sequence (DNA-targeting segment) set forth in any one of SEQ ID NOS: 3148-6241. Alternatively, a guide RNA targeting an RS1 gene can comprise a DNA-targeting segment that is at least 90%, at least 91%, at least 92%, at least 93%, at least 94%, at least 95%, at least 96%, at least 97%, at least 98%, or at least 99% identical to at least 17, at least 18, at least 19, or at least 20 contiguous nucleotides of the sequence (DNA-targeting segment) set forth in any one of SEQ ID NOS: 3148-6241. Alternatively, a guide RNA targeting an RS1 gene can comprise a DNA-targeting segment comprising, consisting essentially of, or consisting of a sequence that differs by no more than 3, no more than 2, or no more than 1 nucleotide from the sequence (DNA-targeting segment) set forth in any one of SEQ ID NOS: 3148-6241. Alternatively, a guide RNA targeting an RS1 gene can comprise a DNA-targeting segment comprising, consisting essentially of, or consisting of a sequence that differs by no more than 3, no more than 2, or no more than 1 nucleotide from at least 17, at least 18, at least 19, or at least 20 contiguous nucleotides of the sequence (DNA-targeting segment) set forth in any one of SEQ ID NOS: 3148-6241. Examples of such guide sequences are set forth in Tables 2 and 3.

[0254] The guide RNA can target a human RS1 gene. As one example, a guide RNA targeting an RS1 gene can comprise a DNA-targeting segment (i.e., guide sequence) comprising, consisting essentially of, or consisting of the sequence (DNA-targeting segment) set forth in any one of SEQ ID NOS: 3148-4989. Alternatively, a guide RNA targeting an RS1 gene can comprise a DNA-targeting segment comprising, consisting essentially of, or consisting of at least 17, at least 18, at least 19, or at least 20 contiguous nucleotides of the sequence (DNA-targeting segment) set forth in any one of SEQ ID NOS: 3148-4989. Alternatively, a guide RNA targeting an RS1 gene can comprise a DNA-targeting segment that is at least 75%, at least 80%, at least 85%, at least 90%, at least 91%, at least 92%, at least 93%, at least 94%, at least 95%, at least 96%, at least 97%, at least 98%, or at least 99% identical to the sequence (DNA-targeting segment) set forth in any one of SEQ ID NOS: 3148-4989. Alternatively, a guide RNA targeting an RS1 gene can comprise a DNA-targeting segment that is at least 90%, at least 91%, at least 92%, at least 93%, at least 94%, at least 95%, at least 96%, at least 97%, at least 98%, or at least 99% identical to the sequence (DNA-targeting segment) set forth in any one of SEQ ID NOS: 3148-4989. Alternatively, a guide RNA targeting an RS1 gene can comprise a DNA-targeting segment that is at least 75%, at least 80%, at least 85%, at least 90%, at least 91%, at least 92%, at least 93%, at least 94%, at least 95%, at least 96%, at least 97%, at least 98%, or at least 99% identical to at least 17, at least 18, at least 19, or at least 20 contiguous nucleotides of the sequence (DNA-targeting segment) set forth in any one of SEQ ID NOS: 3148-4989. Alternatively, a guide RNA targeting an RS1 gene can comprise a DNA-targeting segment that is at least 90%, at least 91%, at least 92%, at least 93%, at least 94%, at least 95%, at least 96%, at least 97%, at least 98%, or at least 99% identical to at least 17, at least 18, at least 19, or at least 20 contiguous nucleotides of the sequence (DNA-targeting segment) set forth in any one of SEQ ID NOS: 3148-4989. Alternatively, a guide RNA targeting an RS1 gene can comprise a DNA-targeting segment comprising, consisting essentially of, or consisting of a sequence that differs by no more than 3, no more than 2, or no more than 1 nucleotide from the sequence (DNA-targeting segment) set forth in any one of SEQ ID NOS: 3148-4989. Alternatively, a guide RNA targeting an RS1 gene can comprise a DNA-targeting segment comprising, consisting essentially of, or consisting of a sequence that differs by no more than 3, no more than 2, or no more than 1 nucleotide from at least 17, at least 18, at least 19, or at least 20 contiguous nucleotides of the sequence (DNA-targeting segment) set forth in any one of SEQ ID NOS: 3148-4989.

[0255] The guide RNA can target a human RS1 gene and be selected to avoid off-target effects. As one example, a guide RNA targeting an RS1 gene can comprise a DNA-targeting segment (i.e., guide sequence) comprising, consisting essentially of, or consisting of the sequence (DNA-targeting segment) set forth in any one of SEQ ID NOS: 3148-3151, 3154-3186, 3188-3247, and 3249-4351. Alternatively, a guide RNA targeting an RS1 gene can comprise a DNA-targeting segment comprising, consisting essentially of, or consisting of at least 17, at least 18, at least 19, or at least 20 contiguous nucleotides of the sequence (DNA-targeting segment) set forth in any one of SEQ ID NOS: 3148-3151, 3154-3186, 3188-3247, and 3249-4351. Alternatively, a guide RNA targeting an RS1 gene can comprise a DNA-targeting segment that is at least 75%, at least 80%, at least 85%, at least 90%, at least 91%, at least 92%, at least 93%, at least 94%, at least 95%, at least 96%, at least 97%, at least 98%, or at least 99% identical to the sequence (DNA-targeting segment) set forth in any one of SEQ ID NOS: 3148-3151, 3154-3186, 3188-3247, and 3249-4351. Alternatively, a guide RNA targeting an RS1 gene can comprise a DNA-targeting segment that is at least 90%, at least 91%, at least 92%, at least 93%, at least 94%, at least 95%, at least 96%, at least 97%, at least 98%, or at least 99% identical to the sequence (DNA-targeting segment) set forth in any one of SEQ ID NOS: 3148-3151, 3154-3186, 3188-3247, and 3249-4351. Alternatively, a guide RNA targeting an RS1 gene can comprise a DNA-targeting segment that is at least 75%, at least 80%, at least 85%, at least 90%, at least 91%, at least 92%, at least 93%, at least 94%, at least 95%, at least 96%, at least 97%, at least 98%, or at least 99% identical to at least 17, at least 18, at least 19, or at least 20 contiguous nucleotides of the sequence (DNA-targeting segment) set forth in any one of SEQ ID NOS: 3148-3151, 3154-3186, 3188-3247, and 3249-4351. Alternatively, a guide RNA targeting an RS1 gene can comprise a DNA-targeting segment that is at least 90%, at least 91%, at least 92%, at least 93%, at least 94%, at least 95%, at least 96%, at least 97%, at least 98%, or at least 99% identical to at least 17, at least 18, at least 19, or at least 20 contiguous nucleotides of the sequence (DNA-targeting segment) set forth in any one of SEQ ID NOS: 3148-3151, 3154-3186, 3188-3247, and 3249-4351. Alternatively, a guide RNA targeting an RS1 gene can comprise a DNA-targeting segment comprising, consisting essentially of, or consisting of a sequence that differs by no more than 3, no more than 2, or no more than 1 nucleotide from the sequence (DNA-targeting segment) set forth in any one of SEQ ID NOS: 3148-3151, 3154-3186, 3188-3247, and 3249-4351. Alternatively, a guide RNA targeting an RS1 gene can comprise a DNA-targeting segment comprising, consisting essentially of, or consisting of a sequence that differs by no more than 3, no more than 2, or no more than 1 nucleotide from at least 17, at least 18, at least 19, or at least 20 contiguous nucleotides of the sequence (DNA-targeting segment) set forth in any one of SEQ ID NOS: 3148-3151, 3154-3186, 3188-3247, and 3249-4351.

[0256] The guide RNA can target a human RS1 gene. As one example, a guide RNA targeting an RS1 gene can comprise a DNA-targeting segment (i.e., guide sequence) comprising, consisting essentially of, or consisting of the sequence (DNA-targeting segment) set forth in any one of SEQ ID NOS: 3150, 3151, 3159, 3675, 4297, and 4304. Alternatively, a guide RNA targeting an RS1 gene can comprise a DNA-targeting segment comprising, consisting essentially of, or consisting of at least 17, at least 18, at least 19, or at least 20 contiguous nucleotides of the sequence (DNA-targeting segment) set forth in any one of SEQ ID NOS: 3150, 3151, 3159, 3675, 4297, and 4304. Alternatively, a guide RNA targeting an RS1 gene can comprise a DNA-targeting segment that is at least 75%, at least 80%, at least 85%, at least 90%, at least 91%, at least 92%, at least 93%, at least 94%, at least 95%, at least 96%, at least 97%, at least 98%, or at least 99% identical to the sequence (DNA-targeting segment) set forth in any one of SEQ ID NOS: 3150, 3151, 3159, 3675, 4297, and 4304. Alternatively, a guide RNA targeting an RS1 gene can comprise a DNA-targeting segment that is at least 90%, at least 91%, at least 92%, at least 93%, at least 94%, at least 95%, at least 96%, at least 97%, at least 98%, or at least 99% identical to the sequence (DNA-targeting segment) set forth in any one of SEQ ID NOS: 3150, 3151, 3159, 3675, 4297, and 4304. Alternatively, a guide RNA targeting an RS1 gene can comprise a DNA-targeting segment that is at least 75%, at least 80%, at least 85%, at least 90%, at least 91%, at least 92%, at least 93%, at least 94%, at least 95%, at least 96%, at least 97%, at least 98%, or at least 99% identical to at least 17, at least 18, at least 19, or at least 20 contiguous nucleotides of the sequence (DNA-targeting segment) set forth in any one of SEQ ID NOS: 3150, 3151, 3159, 3675, 4297, and 4304. Alternatively, a guide RNA targeting an RS1 gene can comprise a DNA-targeting segment that is at least 90%, at least 91%, at least 92%, at least 93%, at least 94%, at least 95%, at least 96%, at least 97%, at least 98%, or at least 99% identical to at least 17, at least 18, at least 19, or at least 20 contiguous nucleotides of the sequence (DNA-targeting segment) set forth in any one of SEQ ID NOS: 3150, 3151, 3159, 3675, 4297, and 4304. Alternatively, a guide RNA targeting an RS1 gene can comprise a DNA-targeting segment comprising, consisting essentially of, or consisting of a sequence that differs by no more than 3, no more than 2, or no more than 1 nucleotide from the sequence (DNA-targeting segment) set forth in any one of SEQ ID NOS: 3150, 3151, 3159, 3675, 4297, and 4304. Alternatively, a guide RNA targeting an RS1 gene can comprise a DNA-targeting segment comprising, consisting essentially of, or consisting of a sequence that differs by no more than 3, no more than 2, or no more than 1 nucleotide from at least 17, at least 18, at least 19, or at least 20 contiguous nucleotides of the sequence (DNA-targeting segment) set forth in any one of SEQ ID NOS: 3150, 3151, 3159, 3675, 4297, and 4304.

[0257] The guide RNA can target a mouse Rs1 gene. As one example, a guide RNA targeting an RS1 gene can comprise a DNA-targeting segment (i.e., guide sequence) comprising, consisting essentially of, or consisting of the sequence (DNA-targeting segment) set forth in any one of SEQ ID NOS: 4990-6241 (e.g., SEQ ID NO: 5477 or 5981). Alternatively, a guide RNA targeting an RS1 gene can comprise a DNA-targeting segment comprising, consisting essentially of, or consisting of at least 17, at least 18, at least 19, or at least 20 contiguous nucleotides of the sequence (DNA-targeting segment) set forth in any one of SEQ ID NOS: 4990-6241 (e.g., SEQ ID NO: 5477 or 5981). Alternatively, a guide RNA targeting an RS1 gene can comprise a DNA-targeting segment that is at least 75%, at least 80%, at least 85%, at least 90%, at least 91%, at least 92%, at least 93%, at least 94%, at least 95%, at least 96%, at least 97%, at least 98%, or at least 99% identical to the sequence (DNA-targeting segment) set forth in any one of SEQ ID NOS: 4990-6241 (e.g., SEQ ID NO: 5477 or 5981). Alternatively, a guide RNA targeting an RS1 gene can comprise a DNA-targeting segment that is at least 90%, at least 91%, at least 92%, at least 93%, at least 94%, at least 95%, at least 96%, at least 97%, at least 98%, or at least 99% identical to the sequence (DNA-targeting segment) set forth in any one of SEQ ID NOS: 4990-6241 (e.g., SEQ ID NO: 5477 or 5981). Alternatively, a guide RNA targeting an RS1 gene can comprise a DNA-targeting segment that is at least 75%, at least 80%, at least 85%, at least 90%, at least 91%, at least 92%, at least 93%, at least 94%, at least 95%, at least 96%, at least 97%, at least 98%, or at least 99% identical to at least 17, at least 18, at least 19, or at least 20 contiguous nucleotides of the sequence (DNA-targeting segment) set forth in any one of SEQ ID NOS: 4990-6241 (e.g., SEQ ID NO: 5477 or 5981). Alternatively, a guide RNA targeting an RS1 gene can comprise a DNA-targeting segment that is at least 90%, at least 91%, at least 92%, at least 93%, at least 94%, at least 95%, at least 96%, at least 97%, at least 98%, or at least 99% identical to at least 17, at least 18, at least 19, or at least 20 contiguous nucleotides of the sequence (DNA-targeting segment) set forth in any one of SEQ ID NOS: 4990-6241 (e.g., SEQ ID NO: 5477 or 5981). Alternatively, a guide RNA targeting an RS1 gene can comprise a DNA-targeting segment comprising, consisting essentially of, or consisting of a sequence that differs by no more than 3, no more than 2, or no more than 1 nucleotide from the sequence (DNA-targeting segment) set forth in any one of SEQ ID NOS: 4990-6241 (e.g., SEQ ID NO: 5477 or 5981). Alternatively, a guide RNA targeting an RS1 gene can comprise a DNA-targeting segment comprising, consisting essentially of, or consisting of a sequence that differs by no more than 3, no more than 2, or no more than 1 nucleotide from at least 17, at least 18, at least 19, or at least 20 contiguous nucleotides of the sequence (DNA-targeting segment) set forth in any one of SEQ ID NOS: 4990-6241 (e.g., SEQ ID NO: 5477 or 5981).

[0258] TracrRNAs can be in any form (e.g., full-length tracrRNAs or active partial tracrRNAs) and of varying lengths. They can include primary transcripts or processed forms. For example, tracrRNAs (as part of a single-guide RNA or as a separate molecule as part of a two-molecule gRNA) may comprise, consist essentially of, or consist of all or a portion of a wild type tracrRNA sequence (e.g., about or more than about 20, 26, 32, 45, 48, 54, 63, 67, 85, or more nucleotides of a wild type tracrRNA sequence). Examples of wild type tracrRNA sequences from S. pyogenes include 171-nucleotide, 89-nucleotide, 75-nucleotide, and 65-nucleotide versions. See, e.g., Deltcheva et al. (2011) Nature 471(7340):602-607; WO 2014/093661, each of which is herein incorporated by reference in its entirety for all purposes. Examples of tracrRNAs within single-guide RNAs (sgRNAs) include the tracrRNA segments found within +48, +54, +67, and +85 versions of sgRNAs, where “+n” indicates that up to the +n nucleotide of wild type tracrRNA is included in the sgRNA. See U.S. Pat. No. 8,697,359, herein incorporated by reference in its entirety for all purposes.

[0259] The percent complementarity between the DNA-targeting segment of the guide RNA and the complementary strand of the target DNA can be at least 60% (e.g., at least 65%, at least 70%, at least 75%, at least 80%, at least 85%, at least 90%, at least 95%, at least 97%, at least 98%, at least 99%, or 100%). The percent complementarity between the DNA-targeting segment and the complementary strand of the target DNA can be at least 60% over about 20 contiguous nucleotides. As an example, the percent complementarity between the DNA-targeting segment and the complementary strand of the target DNA can be 100% over the 14 contiguous nucleotides at the 5′ end of the complementary strand of the target DNA and as low as 0% over the remainder. In such a case, the DNA-targeting segment can be considered to be 14 nucleotides in length. As another example, the percent complementarity between the DNA-targeting segment and the complementary strand of the target DNA can be 100% over the seven contiguous nucleotides at the 5′ end of the complementary strand of the target DNA and as low as 0% over the remainder. In such a case, the DNA-targeting segment can be considered to be 7 nucleotides in length. In some guide RNAs, at least 17 nucleotides within the DNA-targeting segment are complementary to the complementary strand of the target DNA. For example, the DNA-targeting segment can be 20 nucleotides in length and can comprise 1, 2, or 3 mismatches with the complementary strand of the target DNA. In one example, the mismatches are not adjacent to the region of the complementary strand corresponding to the protospacer adjacent motif (PAM) sequence (i.e., the reverse complement of the PAM sequence) (e.g., the mismatches are in the 5′ end of the DNA-targeting segment of the guide RNA, or the mismatches are at least 2, 3, 4, 5, 6, 7, 8, 9, 10, 11, 12, 13, 14, 15, 16, 17, 18, or 19 base pairs away from the region of the complementary strand corresponding to the PAM sequence).

[0260] The protein-binding segment of a gRNA can comprise two stretches of nucleotides that are complementary to one another. The complementary nucleotides of the protein-binding segment hybridize to form a double-stranded RNA duplex (dsRNA). The protein-binding segment of a subject gRNA interacts with a Cas protein, and the gRNA directs the bound Cas protein to a specific nucleotide sequence within target DNA via the DNA-targeting segment.

[0261] Single-guide RNAs can comprise a DNA-targeting segment and a scaffold sequence (i.e., the protein-binding or Cas-binding sequence of the guide RNA). For example, such guide RNAs can have a 5′ DNA-targeting segment joined to a 3′ scaffold sequence. Exemplary scaffold sequences comprise, consist essentially of, or consist of: GUUUUAGAGCUAGAAAUAGCAAGUUAAAAUAAGGCUAGUCCGUUAUCAACUUGA AAAAGUGGCACCGAGUCGGUGCU (version 1; SEQ ID NO: 33); GUUGGAACCAUUCAAAACAGCAUAGCAAGUUAAAAUAAGGCUAGUCCGUUAUCA ACUUGAAAAAGUGGCACCGAGUCGGUGC (version 2; SEQ ID NO: 34); GUUUUAGAGCUAGAAAUAGCAAGUUAAAAUAAGGCUAGUCCGUUAUCAACUUGA AAAAGUGGCACCGAGUCGGUGC (version 3; SEQ ID NO: 35); GUUUAAGAGCUAUGCUGGAAACAGCAUAGCAAGUUUAAAUAAGGCUAGUCCGUU AUCAACUUGAAAAAGUGGCACCGAGUCGGUGC (version 4; SEQ ID NO: 36);GUUUUAGAGCUAGAAAUAGCAAGUUAAAAUAAGGCUAGUCCGUUAUCAACUU GAAAAAGUGGCACCGAGUCGGUGCUUUUUUU (version 5; SEQ ID NO: 37); GUUUUAGAGCUAGAAAUAGCAAGUUAAAAUAAGGCUAGUCCGUUAUCAACUUGA AAAAGUGGCACCGAGUCGGUGCUUUU (version 6; SEQ ID NO: 38); GUUUAAGAGCUAUGCUGGAAACAGCAUAGCAAGUUUAAAUAAGGCUAGUCCGUU AUCAACUUGAAAAAGUGGCACCGAGUCGGUGCUUUUUU (version 7; SEQ ID NO: 39); or GUUUUAGAGCUAGAAAUAGCAAGUUAAAAUAAGGCUAGUCCGUUAUCAACUUGG CACCGAGUCGGUGC (version 8; SEQ ID NO: 53). In some guide sgRNAs, the four terminal U residues of version 6 are not present. In some sgRNAs, only 1, 2, or 3 of the four terminal U residues of version 6 are present. Guide RNAs targeting any of the guide RNA target sequences disclosed herein can include, for example, a DNA-targeting segment on the 5′ end of the guide RNA fused to any of the exemplary guide RNA scaffold sequences on the 3′ end of the guide RNA. That is, any of the DNA-targeting segments disclosed herein can be joined to the 5′ end of any one of the above scaffold sequences to form a single guide RNA (chimeric guide RNA).

[0262] Guide RNAs can include modifications or sequences that provide for additional desirable features (e.g., modified or regulated stability; subcellular targeting; tracking with a fluorescent label; a binding site for a protein or protein complex; and the like). That is, guide RNAs can include one or more modified nucleosides or nucleotides, or one or more non-naturally and/or naturally occurring components or configurations that are used instead of or in addition to the canonical A, G, C, and U residues. Examples of such modifications include, for example, a 5′ cap (e.g., a 7-methylguanylate cap (m7G)); a 3′ polyadenylated tail (i.e., a 3′ poly(A) tail); a riboswitch sequence (e.g., to allow for regulated stability and/or regulated accessibility by proteins and/or protein complexes); a stability control sequence; a sequence that forms a dsRNA duplex (i.e., a hairpin); a modification or sequence that targets the RNA to a subcellular location (e.g., nucleus, mitochondria, chloroplasts, and the like); a modification or sequence that provides for tracking (e.g., direct conjugation to a fluorescent molecule, conjugation to a moiety that facilitates fluorescent detection, a sequence that allows for fluorescent detection, and so forth); a modification or sequence that provides a binding site for proteins (e.g., proteins that act on DNA, including transcriptional activators, transcriptional repressors, DNA methyltransferases, DNA demethylases, histone acetyltransferases, histone deacetylases, and the like); and combinations thereof. Other examples of modifications include engineered stem loop duplex structures, engineered bulge regions, engineered hairpins 3′ of the stem loop duplex structure, or any combination thereof. See, e.g., US 2015/0376586, herein incorporated by reference in its entirety for all purposes. A bulge can be an unpaired region of nucleotides within the duplex made up of the crRNA-like region and the minimum tracrRNA-like region. A bulge can comprise, on one side of the duplex, an unpaired 5′-XXXY-3′ where X is any purine and Y can be a nucleotide that can form a wobble pair with a nucleotide on the opposite strand, and an unpaired nucleotide region on the other side of the duplex.

[0263] Unmodified nucleic acids can be prone to degradation. Exogenous nucleic acids can also induce an innate immune response. Modifications can help introduce stability and reduce immunogenicity. Guide RNAs can comprise modified nucleosides and modified nucleotides including, for example, one or more of the following: (1) alteration or replacement of one or both of the non-linking phosphate oxygens and/or of one or more of the linking phosphate oxygens in the phosphodiester backbone linkage (an exemplary backbone modification); (2) alteration or replacement of a constituent of the ribose sugar such as alteration or replacement of the 2′ hydroxyl on the ribose sugar (an exemplary sugar modification); (3) replacement (e.g., wholesale replacement) of the phosphate moiety with dephospho linkers (an exemplary backbone modification); (4) modification or replacement of a naturally occurring nucleobase, including with a non-canonical nucleobase (an exemplary base modification); (5) replacement or modification of the ribose-phosphate backbone (an exemplary backbone modification); (6) modification of the 3′ end or 5′ end of the oligonucleotide (e.g., removal, modification or replacement of a terminal phosphate group or conjugation of a moiety, cap, or linker (such 3′ or 5′ cap modifications may comprise a sugar and/or backbone modification)); and (7) modification ore replacement of the sugar (an exemplary sugar modification). Other possible guide RNA modifications include modifications of or replacement of uracils or poly-uracil tracts. See, e.g., WO 2015/048577 and US 2016/0237455, each of which is herein incorporated by reference in its entirety for all purposes. Similar modifications can be made to Cas-encoding nucleic acids, such as Cas mRNAs. For example, Cas mRNAs can be modified by depletion of uridine using synonymous codons.

[0264] Chemical modifications such at hose listed above can be combined to provide modified gRNAs and/or mRNAs comprising residues (nucleosides and nucleotides) that can have two, three, four, or more modifications. For example, a modified residue can have a modified sugar and a modified nucleobase. In one example, every base of a gRNA is modified (e.g., all bases have a modified phosphate group, such as a phosphorothioate group). For example, all or substantially all of the phosphate groups of a gRNA can be replaced with phosphorothioate groups. Alternatively or additionally, a modified gRNA can comprise at least one modified residue at or near the 5′ end. Alternatively or additionally, a modified gRNA can comprise at least one modified residue at or near the 3′ end.

[0265] Some gRNAs comprise one, two, three or more modified residues. For example, at least 5%, at least 10%, at least 15%, at least 20%, at least 25%, at least 30%, at least 35%, at least 40%, at least 45%, at least 50%, at least 55%, at least 60%, at least 65%, at least 70%, at least 75%, at least 80%, at least 85%, at least 90%, at least 95%, or 100% of the positions in a modified gRNA can be modified nucleosides or nucleotides.

[0266] Unmodified nucleic acids can be prone to degradation. Exogenous nucleic acids can also induce an innate immune response. Modifications can help introduce stability and reduce immunogenicity. Some gRNAs described herein can contain one or more modified nucleosides or nucleotides to introduce stability toward intracellular or serum-based nucleases. Some modified gRNAs described herein can exhibit a reduced innate immune response when introduced into a population of cells.

[0267] The gRNAs disclosed herein can comprise a backbone modification in which the phosphate group of a modified residue can be modified by replacing one or more of the oxygens with a different substituent. The modification can include the wholesale replacement of an unmodified phosphate moiety with a modified phosphate group as described herein. Backbone modifications of the phosphate backbone can also include alterations that result in either an uncharged linker or a charged linker with unsymmetrical charge distribution.

[0268] Examples of modified phosphate groups include, phosphorothioate, phosphoroselenates, borano phosphates, borano phosphate esters, hydrogen phosphonates, phosphoroamidates, alkyl or aryl phosphonates and phosphotriesters. The phosphorous atom in an unmodified phosphate group is achiral. However, replacement of one of the non-bridging oxygens with one of the above atoms or groups of atoms can render the phosphorous atom chiral. The stereogenic phosphorous atom can possess either the “R” configuration (Rp) or the “S” configuration (Sp). The backbone can also be modified by replacement of a bridging oxygen, (i.e., the oxygen that links the phosphate to the nucleoside), with nitrogen (bridged phosphoroamidates), sulfur (bridged phosphorothioates) and carbon (bridged methylenephosphonates). The replacement can occur at either linking oxygen or at both of the linking oxygens.

[0269] The phosphate group can be replaced by non-phosphorus containing connectors in certain backbone modifications. In some embodiments, the charged phosphate group can be replaced by a neutral moiety. Examples of moieties which can replace the phosphate group can include, without limitation, e.g., methyl phosphonate, hydroxylamino, siloxane, carbonate, carboxymethyl, carbamate, amide, thioether, ethylene oxide linker, sulfonate, sulfonamide, thioformacetal, formacetal, oxime, methyleneimino, methylenemethylimino, methylenehydrazo, methylenedimethylhydrazo and methyleneoxymethylimino.

[0270] Scaffolds that can mimic nucleic acids can also be constructed wherein the phosphate linker and ribose sugar are replaced by nuclease resistant nucleoside or nucleotide surrogates. Such modifications may comprise backbone and sugar modifications. In some embodiments, the nucleobases can be tethered by a surrogate backbone. Examples can include, without limitation, the morpholino, cyclobutyl, pyrrolidine and peptide nucleic acid (PNA) nucleoside surrogates.

[0271] The modified nucleosides and modified nucleotides can include one or more modifications to the sugar group (a sugar modification). For example, the 2′ hydroxyl group (OH) can be modified (e.g., replaced with a number of different oxy or deoxy substituents. Modifications to the 2′ hydroxyl group can enhance the stability of the nucleic acid since the hydroxyl can no longer be deprotonated to form a 2′-alkoxide ion.

[0272] Examples of 2′ hydroxyl group modifications can include alkoxy or aryloxy (OR, wherein “R” can be, e.g., alkyl, cycloalkyl, aryl, aralkyl, heteroaryl or a sugar); polyethyleneglycols (PEG), O(CH₂CH₂O)ₙCH₂CH₂OR wherein R can be, e.g., H or optionally substituted alkyl, and n can be an integer from 0 to 20 (e.g., from 0 to 4, from 0 to 8, from 0 to 10, from 0 to 16, from 1 to 4, from 1 to 8, from 1 to 10, from 1 to 16, from 1 to 20, from 2 to 4, from 2 to 8, from 2 to 10, from 2 to 16, from 2 to 20, from 4 to 8, from 4 to 10, from 4 to 16, and from 4 to 20). The 2′ hydroxyl group modification can be 2′-O-Me. Likewise, the 2′ hydroxyl group modification can be a 2′-fluoro modification, which replaces the 2′ hydroxyl group with a fluoride. The 2′ hydroxyl group modification can include locked nucleic acids (LNA) in which the 2′ hydroxyl can be connected, e.g., by a C₁₋₆ alkylene or C₁₋₆ heteroalkylene bridge, to the 4′ carbon of the same ribose sugar, where exemplary bridges can include methylene, propylene, ether, or amino bridges; O-amino (wherein amino can be, e.g., NH₂; alkylamino, dialkylamino, heterocyclyl, arylamino, diarylamino, heteroarylamino, or diheteroarylamino, ethylenediamine, or polyamino) and aminoalkoxy, O(CH₂)ₙ-amino, (wherein amino can be, e.g., NH₂; alkylamino, dialkylamino, heterocyclyl, arylamino, diarylamino, heteroarylamino, or diheteroarylamino, ethylenediamine, or polyamino). The 2′ hydroxyl group modification can include unlocked nucleic acids (UNA) in which the ribose ring lacks the C2′—C3′ bond. The 2′ hydroxyl group modification can include the methoxyethyl group (MOE), (OCH₂CH₂OCH₃, e.g., a PEG derivative).

[0273] Deoxy 2′ modifications can include hydrogen (i.e. deoxyribose sugars, e.g., at the overhang portions of partially dsRNA); halo (e.g., bromo, chloro, fluoro, or iodo); amino (wherein amino can be, e.g., NH2; alkylamino, dialkylamino, heterocyclyl, arylamino, diarylamino, heteroarylamino, diheteroarylamino, or amino acid); NH(CH₂CH₂NH)ₙCH₂CH₂-amino (wherein amino can be, e.g., as described herein), —NHC(O)R (wherein R can be, e.g., alkyl, cycloalkyl, aryl, aralkyl, heteroaryl or sugar), cyano; mercapto; alkyl-thio-alkyl; thioalkoxy; and alkyl, cycloalkyl, aryl, alkenyl and alkynyl, which may be optionally substituted with e.g., an amino as described herein.

[0274] The sugar modification can comprise a sugar group which may also contain one or more carbons that possess the opposite stereochemical configuration than that of the corresponding carbon in ribose. Thus, a modified nucleic acid can include nucleotides containing e.g., arabinose, as the sugar. The modified nucleic acids can also include abasic sugars. These abasic sugars can also be further modified at one or more of the constituent sugar atoms. The modified nucleic acids can also include one or more sugars that are in the L form (e.g. L-nucleosides).

[0275] The modified nucleosides and modified nucleotides described herein, which can be incorporated into a modified nucleic acid, can include a modified base, also called a nucleobase. Examples of nucleobases include, but are not limited to, adenine (A), guanine (G), cytosine (C), and uracil (U). These nucleobases can be modified or wholly replaced to provide modified residues that can be incorporated into modified nucleic acids. The nucleobase of the nucleotide can be independently selected from a purine, a pyrimidine, a purine analog, or pyrimidine analog. In some embodiments, the nucleobase can include, for example, naturally-occurring and synthetic derivatives of a base.

[0276] In a dual guide RNA, each of the crRNA and the tracrRNA can contain modifications. Such modifications may be at one or both ends of the crRNA and/or tracrRNA. In a sgRNA, one or more residues at one or both ends of the sgRNA may be chemically modified, and/or internal nucleosides may be modified, and/or the entire sgRNA may be chemically modified. Some gRNAs comprise a 5′ end modification. Some gRNAs comprise a 3′ end modification.

[0277] The guide RNAs disclosed herein can comprise one of the modification patterns disclosed in WO 2018/107028 A1, herein incorporated by reference in its entirety for all purposes. The guide RNAs disclosed herein can also comprise one of the structures/modification patterns disclosed in US 2017/0114334, herein incorporated by reference in its entirety for all purposes. The guide RNAs disclosed herein can also comprise one of the structures/modification patterns disclosed in WO 2017/136794, WO 2017/004279, US 2018/0187186, or US 2019/0048338, each of which is herein incorporated by reference in its entirety for all purposes.

[0278] As one example, nucleotides at the 5′ or 3′ end of a guide RNA can include phosphorothioate linkages (e.g., the bases can have a modified phosphate group that is a phosphorothioate group). For example, a guide RNA can include phosphorothioate linkages between the 2, 3, or 4 terminal nucleotides at the 5′ or 3′ end of the guide RNA. As another example, nucleotides at the 5′ and/or 3′ end of a guide RNA can have 2′-O-methyl modifications. For example, a guide RNA can include 2′-O-methyl modifications at the 2, 3, or 4 terminal nucleotides at the 5′ and/or 3′ end of the guide RNA (e.g., the 5′ end). See, e.g., WO 2017/173054 A1 and Finn et al. (2018) Cell Rep. 22(9):2227-2235, each of which is herein incorporated by reference in its entirety for all purposes. Other possible modifications are described in more detail elsewhere herein. In one specific example, the guide RNA includes 2′-O-methyl analogs and 3′ phosphorothioate internucleotide linkages at the first three 5′ and 3′ terminal RNA residues. In another specific example, the guide RNA is modified such that all 2′OH groups that do not interact with the Cas9 protein are replaced with 2′-O-methyl analogs, and the tail region of the guide RNA, which has minimal interaction with Cas9, is modified with 5′ and 3′ phosphorothioate internucleotide linkages. Additionally, the DNA-targeting segment can have 2′-fluoro modifications on some bases. See, e.g., Yin et al. (2017) Nat. Biotech. 35(12):1179-1187, herein incorporated by reference in its entirety for all purposes. Other examples of modified guide RNAs are provided, e.g., in WO 2018/107028 A1, herein incorporated by reference in its entirety for all purposes. Such chemical modifications can, for example, provide greater stability and protection from exonucleases to guide RNAs, allowing them to persist within cells for longer than unmodified guide RNAs. Such chemical modifications can also, for example, protect against innate intracellular immune responses that can actively degrade RNA or trigger immune cascades that lead to cell death.

[0279] As one example, any of the guide RNAs described herein can comprise at least one modification. In one example, the at least one modification comprises a 2′-O-methyl (2′-O-Me) modified nucleotide, a phosphorothioate (PS) bond between nucleotides, a 2′-fluoro (2′-F) modified nucleotide, or a combination thereof. For example, the at least one modification can comprise a 2′-O-methyl (2′-O-Me) modified nucleotide. Alternatively or additionally, the at least one modification can comprise a phosphorothioate (PS) bond between nucleotides. Alternatively or additionally, the at least one modification can comprise a 2′-fluoro (2′-F) modified nucleotide. In one example, a guide RNA described herein comprises one or more 2′-O-methyl (2′-O-Me) modified nucleotides and one or more phosphorothioate (PS) bonds between nucleotides.

[0280] The modifications can occur anywhere in the guide RNA. As one example, the guide RNA comprises a modification at one or more of the first five nucleotides at the 5′ end of the guide RNA, the guide RNA comprises a modification at one or more of the last five nucleotides of the 3′ end of the guide RNA, or a combination thereof. For example, the guide RNA can comprise phosphorothioate bonds between the first four nucleotides of the guide RNA, phosphorothioate bonds between the last four nucleotides of the guide RNA, or a combination thereof. Alternatively or additionally, the guide RNA can comprise 2′-O-Me modified nucleotides at the first three nucleotides at the 5′ end of the guide RNA, can comprise 2′-O-Me modified nucleotides at the last three nucleotides at the 3′ end of the guide RNA, or a combination thereof.

[0281] In one example, a modified gRNA can comprise the following sequence: mN*mN*mN*NNNNNNNNNNNNNNNNNGUUUUAGAmGmCmUmAmGmAmAmAmUmA mGmCAAGUUAAAAUAAGGCUAGUCCGUUAUCAmAmCmUmUmGmAmAmAmAmAm GmUmGmGmCmAmCmCmGmAmGmUmCmGmGmUmGmCmU*mU*mU*mU (SEQ ID NO: 44), where “N” may be any natural or non-natural nucleotide, and wherein the totality of N residues comprise an RS1 DNA-targeting segment as described herein (e.g., the sequence set forth in SEQ ID NO: 44, wherein the N residues are replaced with the DNA-targeting segment of any one of SEQ ID NOS: 3148-6241, or any one of SEQ ID NOS: 3148-4989, or any one of SEQ ID NOS: 3148-3151, 3154-3186, 3188-3247, and 3249-4351, or any one of SEQ ID NOS: 3150, 3151, 3159, 3675, 4297, and 4304, or any one of SEQ ID NOS: 4990-6241 (e.g., 5477 or 5981). The terms “mA,” “mC,” “mU,” and “mG” denote a nucleotide (A, C, U, and G, respectively) that has been modified with 2′-O-Me. The symbol “*” depicts a phosphorothioate modification. A phosphorothioate linkage or bond refers to a bond where a sulfur is substituted for one nonbridging phosphate oxygen in a phosphodiester linkage, for example in the bonds between nucleotides bases. When phosphorothioates are used to generate oligonucleotides, the modified oligonucleotides may also be referred to as S-oligos. The terms A*, C*, U*, or G* denote a nucleotide that is linked to the next (e.g., 3′) nucleotide with a phosphorothioate bond. The terms “mA*,” “mC*,” “mU*,” and “mG*” denote a nucleotide (A, C, U, and G, respectively) that has been substituted with 2′-O-Me and that is linked to the next (e.g., 3′) nucleotide with a phosphorothioate bond.

[0282] Another chemical modification that has been shown to influence nucleotide sugar rings is halogen substitution. For example, 2′-fluoro (2′-F) substitution on nucleotide sugar rings can increase oligonucleotide binding affinity and nuclease stability. Abasic nucleotides refer to those which lack nitrogenous bases. Inverted bases refer to those with linkages that are inverted from the normal 5′ to 3′ linkage (i.e., either a 5′ to 5′ linkage or a 3′ to 3′ linkage).

[0283] An abasic nucleotide can be attached with an inverted linkage. For example, an abasic nucleotide may be attached to the terminal 5′ nucleotide via a 5′ to 5′ linkage, or an abasic nucleotide may be attached to the terminal 3′ nucleotide via a 3′ to 3′ linkage. An inverted abasic nucleotide at either the terminal 5′ or 3′ nucleotide may also be called an inverted abasic end cap.

[0284] In one example, one or more of the first three, four, or five nucleotides at the 5′ terminus, and one or more of the last three, four, or five nucleotides at the 3′ terminus are modified. The modification can be, for example, a 2′-O-Me, 2′-F, inverted abasic nucleotide, phosphorothioate bond, or other nucleotide modification well known to increase stability and/or performance.

[0285] In another example, the first four nucleotides at the 5′ terminus, and the last four nucleotides at the 3′ terminus can be linked with phosphorothioate bonds.

[0286] In another example, the first three nucleotides at the 5′ terminus, and the last three nucleotides at the 3′ terminus can comprise a 2′-O-methyl (2′-O-Me) modified nucleotide. In another example, the first three nucleotides at the 5′ terminus, and the last three nucleotides at the 3′ terminus comprise a 2′-fluoro (2′-F) modified nucleotide. In another example, the first three nucleotides at the 5′ terminus, and the last three nucleotides at the 3′ terminus comprise an inverted abasic nucleotide.

[0287] Guide RNAs can be provided in any form. For example, the gRNA can be provided in the form of RNA, either as two molecules (separate crRNA and tracrRNA) or as one molecule (sgRNA), and optionally in the form of a complex with a Cas protein. The gRNA can also be provided in the form of DNA encoding the gRNA. The DNA encoding the gRNA can encode a single RNA molecule (sgRNA) or separate RNA molecules (e.g., separate crRNA and tracrRNA). In the latter case, the DNA encoding the gRNA can be provided as one DNA molecule or as separate DNA molecules encoding the crRNA and tracrRNA, respectively.

[0288] When a gRNA is provided in the form of DNA, the gRNA can be transiently, conditionally, or constitutively expressed in the cell. DNAs encoding gRNAs can be stably integrated into the genome of the cell and operably linked to a promoter active in the cell. Alternatively, DNAs encoding gRNAs can be operably linked to a promoter in an expression construct. For example, the DNA encoding the gRNA can be in a vector comprising a heterologous nucleic acid, such as a nucleic acid encoding a Cas protein. Alternatively, it can be in a vector or a plasmid that is separate from the vector comprising the nucleic acid encoding the Cas protein. Promoters that can be used in such expression constructs include promoters active, for example, in one or more of a eukaryotic cell, a human cell, a non-human cell, a mammalian cell, a non-human mammalian cell, a rodent cell, a mouse cell, a rat cell, a pluripotent cell, an embryonic stem (ES) cell, an adult stem cell, a developmentally restricted progenitor cell, an induced pluripotent stem (iPS) cell, or a one-cell stage embryo. Such promoters can be, for example, conditional promoters, inducible promoters, constitutive promoters, or tissue-specific promoters. Such promoters can also be, for example, bidirectional promoters. Specific examples of suitable promoters include an RNA polymerase III promoter, such as a human U6 promoter, a rat U6 polymerase III promoter, or a mouse U6 polymerase III promoter. In another example, the small tRNA Gln can be used to drive expression of a guide RNA.

[0289] Alternatively, gRNAs can be prepared by various other methods. For example, gRNAs can be prepared by in vitro transcription using, for example, T7 RNA polymerase (see, e.g., WO 2014/089290 and WO 2014/065596, each of which is herein incorporated by reference in its entirety for all purposes). Guide RNAs can also be a synthetically produced molecule prepared by chemical synthesis. For example, a guide RNA can be chemically synthesized to include 2′-O-methyl analogs and 3′ phosphorothioate internucleotide linkages at the first three 5′ and 3′ terminal RNA residues.

[0290] Guide RNAs (or nucleic acids encoding guide RNAs) can be in compositions comprising one or more guide RNAs (e.g., 1, 2, 3, 4, or more guide RNAs) and a carrier increasing the stability of the guide RNA (e.g., prolonging the period under given conditions of storage (e.g., −20° C., 4° C., or ambient temperature) for which degradation products remain below a threshold, such below 0.5% by weight of the starting nucleic acid or protein; or increasing the stability in vivo). Non-limiting examples of such carriers include poly(lactic acid) (PLA) microspheres, poly(D,L-lactic-coglycolic-acid) (PLGA) microspheres, liposomes, micelles, inverse micelles, lipid cochleates, and lipid microtubules. Such compositions can further comprise a Cas protein, such as a Cas9 protein, or a nucleic acid encoding a Cas protein.

### 3. Guide RNA Target Sequences

[0291] Target DNAs for guide RNAs include nucleic acid sequences present in a DNA to which a DNA-targeting segment of a gRNA will bind, provided sufficient conditions for binding exist. Suitable DNA/RNA binding conditions include physiological conditions normally present in a cell. Other suitable DNA/RNA binding conditions (e.g., conditions in a cell-free system) are known in the art (see, e.g., Molecular Cloning: A Laboratory Manual, 3rd Ed. (Sambrook et al., Harbor Laboratory Press 2001), herein incorporated by reference in its entirety for all purposes). The strand of the target DNA that is complementary to and hybridizes with the gRNA can be called the “complementary strand,” and the strand of the target DNA that is complementary to the “complementary strand” (and is therefore not complementary to the Cas protein or gRNA) can be called “noncomplementary strand” or “template strand.”

[0292] The target DNA includes both the sequence on the complementary strand to which the guide RNA hybridizes and the corresponding sequence on the non-complementary strand (e.g., adjacent to the protospacer adjacent motif (PAM)). Unless otherwise specified, the term “guide RNA target sequence” as used herein refers specifically to the sequence on the non-complementary strand corresponding to (i.e., the reverse complement of) the sequence to which the guide RNA hybridizes on the complementary strand. That is, the guide RNA target sequence refers to the sequence on the non-complementary strand adjacent to the PAM (e.g., upstream or 5′ of the PAM in the case of Cas9). A guide RNA target sequence is equivalent to the DNA-targeting segment of a guide RNA, but with thymines instead of uracils. As one example, a guide RNA target sequence for an SpCas9 enzyme can refer to the sequence upstream of the 5′-NGG-3′ PAM on the non-complementary strand. A guide RNA is designed to have complementarity to the complementary strand of a target DNA, where hybridization between the DNA-targeting segment of the guide RNA and the complementary strand of the target DNA promotes the formation of a CRISPR complex. Full complementarity is not necessarily required, provided that there is sufficient complementarity to cause hybridization and promote formation of a CRISPR complex. If a guide RNA is referred to herein as targeting a guide RNA target sequence, what is meant is that the guide RNA hybridizes to the complementary strand sequence of the target DNA that is the reverse complement of the guide RNA target sequence on the non-complementary strand.

[0293] A target DNA or guide RNA target sequence can comprise any polynucleotide, and can be located, for example, in the nucleus or cytoplasm of a cell or within an organelle of a cell, such as a mitochondrion or chloroplast. A target DNA or guide RNA target sequence can be any nucleic acid sequence endogenous or exogenous to a cell. The guide RNA target sequence can be a sequence coding a gene product (e.g., a protein) or a non-coding sequence (e.g., a regulatory sequence) or can include both.

[0294] Site-specific binding and cleavage of a target DNA by a Cas protein can occur at locations determined by both (i) base-pairing complementarity between the guide RNA and the complementary strand of the target DNA and (ii) a short motif, called the protospacer adjacent motif (PAM), in the non-complementary strand of the target DNA. The PAM can flank the guide RNA target sequence. Optionally, the guide RNA target sequence can be flanked on the 3′ end by the PAM (e.g., for Cas9). Alternatively, the guide RNA target sequence can be flanked on the 5′ end by the PAM (e.g., for Cpf1). For example, the cleavage site of Cas proteins can be about 1 to about 10 or about 2 to about 5 base pairs (e.g., 3 base pairs) upstream or downstream of the PAM sequence (e.g., within the guide RNA target sequence). In the case of SpCas9, the PAM sequence (i.e., on the non-complementary strand) can be 5′-N₁GG-3′, where N₁ is any DNA nucleotide, and where the PAM is immediately 3′ of the guide RNA target sequence on the non-complementary strand of the target DNA. As such, the sequence corresponding to the PAM on the complementary strand (i.e., the reverse complement) would be 5′-CCN₂-3′, where N₂ is any DNA nucleotide and is immediately 5′ of the sequence to which the DNA-targeting segment of the guide RNA hybridizes on the complementary strand of the target DNA. In some such cases, N₁ and N₂ can be complementary and the N₁-N₂ base pair can be any base pair (e.g., N₁=C and N₂=G; N₁=G and N₂=C; N₁=A and N₂=T; or N₁=T, and N₂=A). In the case of Cas9 from S. aureus, the PAM can be NNGRRT or NNGRR, where N can A, G, C, or T, and R can be G or A. In the case of Cas9 from C. jejuni, the PAM can be, for example, NNNNACAC or NNNNRYAC, where N can be A, G, C, or T, and R can be G or A. In some cases (e.g., for FnCpf1), the PAM sequence can be upstream of the 5′ end and have the sequence 5′-TTN-3′.

[0295] An example of a guide RNA target sequence is a 20-nucleotide DNA sequence immediately preceding an NGG motif recognized by an SpCas9 protein. For example, two examples of guide RNA target sequences plus PAMs are GN₁₉NGG (SEQ ID NO: 40) or N₂₀NGG (SEQ ID NO: 41). See, e.g., WO 2014/165825, herein incorporated by reference in its entirety for all purposes. The guanine at the 5′ end can facilitate transcription by RNA polymerase in cells. Other examples of guide RNA target sequences plus PAMs can include two guanine nucleotides at the 5′ end (e.g., GGN₂₀NGG; SEQ ID NO: 42) to facilitate efficient transcription by T7 polymerase in vitro. See, e.g., WO 2014/065596, herein incorporated by reference in its entirety for all purposes. Other guide RNA target sequences plus PAMs can have between 4-22 nucleotides in length of SEQ ID NOS: 40-42, including the 5′ G or GG and the 3′ GG or NGG. Yet other guide RNA target sequences plus PAMs can have between 14 and 20 nucleotides in length of SEQ ID NOS: 40-42.

[0296] Guide RNAs targeting an RS1 gene can target, for example, the first intron of the RS1 gene, or a sequence adjacent to the first intron of the RS1 gene (e.g., in the first exon or the second exon of the RS1 gene.

[0297] Formation of a CRISPR complex hybridized to a target DNA can result in cleavage of one or both strands of the target DNA within or near the region corresponding to the guide RNA target sequence (i.e., the guide RNA target sequence on the non-complementary strand of the target DNA and the reverse complement on the complementary strand to which the guide RNA hybridizes). For example, the cleavage site can be within the guide RNA target sequence (e.g., at a defined location relative to the PAM sequence). The “cleavage site” includes the position of a target DNA at which a Cas protein produces a single-strand break or a double-strand break. The cleavage site can be on only one strand (e.g., when a nickase is used) or on both strands of a double-stranded DNA. Cleavage sites can be at the same position on both strands (producing blunt ends; e.g. Cas9)) or can be at different sites on each strand (producing staggered ends (i.e., overhangs); e.g., Cpf1). Staggered ends can be produced, for example, by using two Cas proteins, each of which produces a single-strand break at a different cleavage site on a different strand, thereby producing a double-strand break. For example, a first nickase can create a single-strand break on the first strand of double-stranded DNA (dsDNA), and a second nickase can create a single-strand break on the second strand of dsDNA such that overhanging sequences are created. In some cases, the guide RNA target sequence or cleavage site of the nickase on the first strand is separated from the guide RNA target sequence or cleavage site of the nickase on the second strand by at least 2, 3, 4, 5, 6, 7, 8, 9, 10, 15, 20, 25, 30, 40, 50, 75, 100, 250, 500, or 1,000 base pairs.

[0298] A guide RNA targeting an RS1 gene, such as a human RS1 gene, can target any desired location in the RS1 gene. Guide RNAs targeting an RS1 gene can target, for example, the first intron of the RS1 gene, or a sequence adjacent to the first intron of the RS1 gene (e.g., in the first exon or the second exon of the RS1 gene. For example, a guide RNA target sequence can comprise any contiguous sequence in the RS1 gene. The term RS1 gene includes the genomic region encompassing the RS1 regulatory promoters and enhancer sequences as well as the coding sequence. A guide RNA target sequence can comprise a coding sequence, a non-coding sequence (e.g., a regulatory element such as a promoter or enhancer region), or a combination thereof. As one example, a guide RNA target sequence can comprise a contiguous coding sequence in any of the RS1 coding exons. As one example, the guide RNA target sequence can be in exon 1 of the RS1 gene. As another example, the guide RNA target sequence can be in exon 2 of the RS1 gene. As another example, the guide RNA target sequence can be in exon 3 of the RS1 gene. As another example, the guide RNA target sequence can be in exon 4 of the RS1 gene. As another example, the guide RNA target sequence can be in exon 5 of the RS1 gene. As another example, the guide RNA target sequence can be in exon 6 of the RS1 gene. A guide RNA target sequence can also comprise a contiguous sequence in any of the RS1 introns. As one example, the guide RNA target sequence can be in intron 1 of the RS1 gene. As another example, the guide RNA target sequence can be in intron 2 of the RS1 gene. As another example, the guide RNA target sequence can be in intron 3 of the RS1 gene. As another example, the guide RNA target sequence can be in intron 4 of the RS1 gene. As another example, the guide RNA target sequence can be in intron 5 of the RS1 gene. As another example, the guide RNA target sequence can be in intron 6 of the RS1 gene.

[0299] The guide RNA target sequence can also be selected to minimize off-target modification or avoid off-target effects (e.g., by avoiding two or fewer mismatches to off-target genomic sequences).

[0300] As one example, a guide RNA targeting an RS1 gene can target the guide RNA target sequence set forth in any one of SEQ ID NOS: 54-3147. As another example, a guide RNA targeting an RS1 gene can target at least 17, at least 18, at least 19, or at least 20 contiguous nucleotides of the guide RNA target sequence set forth in any one of SEQ ID NOS: 54-3147. Examples of such guide RNA target sequences are set forth in Tables 2 and 3.

[0301] As one example, a guide RNA targeting a human RS1 gene can target the guide RNA target sequence set forth in any one of SEQ ID NOS: 54-1895. As another example, a guide RNA targeting a human RS1 gene can target at least 17, at least 18, at least 19, or at least 20 contiguous nucleotides of the guide RNA target sequence set forth in any one of SEQ ID NOS: 54-1895.

[0302] As one example, a guide RNA targeting a human RS1 gene can target the guide RNA target sequence set forth in any one of SEQ ID NOS: 54-57, 60-92, 94-153, and 155-1257. As another example, a guide RNA targeting a human RS1 gene can target at least 17, at least 18, at least 19, or at least 20 contiguous nucleotides of the guide RNA target sequence set forth in any one of SEQ ID NOS: 54-57, 60-92, 94-153, and 155-1257.

[0303] As one example, a guide RNA targeting a human RS1 gene can target the guide RNA target sequence set forth in any one of SEQ ID NOS: 56, 57, 65, 581, 1203, and 1210. As another example, a guide RNA targeting a human RS1 gene can target at least 17, at least 18, at least 19, or at least 20 contiguous nucleotides of the guide RNA target sequence set forth in any one of SEQ ID NOS: 56, 57, 65, 581, 1203, and 1210.

[0304] As one example, a guide RNA targeting a mouse Rs1 gene can target the guide RNA target sequence set forth in any one of SEQ ID NOS: 1896-3147 (e.g., SEQ ID NO: 2383 or 2887). As another example, a guide RNA targeting a mouse Rs1 gene can target at least 17, at least 18, at least 19, or at least 20 contiguous nucleotides of the guide RNA target sequence set forth in any one of SEQ ID NOS: 1896-3147 (e.g., SEQ ID NO: 2383 or 2887).

TABLE 2
Human RS1 Intron 1 Guide RNA Target Sequences and Guide
Sequences.

| Target | SEQ ID NO. | PAM | Direction | Guide | SEQ ID NO. |
|---|---|---|---|---|---|
| GGGCCTTATGCATCTCCATC | 54 | TGG | − | GGGCCUUAUGCAUCUCCAUC | 3148 |
| TAATCAGCATATTATCCAGA | 55 | TGG | + | UAAUCAGCAUAUUAUCCAGA | 3149 |
| CCCTTTTGTACGTTTTTTAA | 56 | TGG | + | CCCUUUUGUACGUUUUUUAA | 3150 |
| CTGTATCTTCTTAGCCAGTA | 57 | CGG | + | CUGUAUCUUCUUAGCCAGUA | 3151 |
| GTTAACGCGTCATTTACATT | 58 | AGG | − | GUUAACGCGUCAUUUACAUU | 3152 |
| TACAATAAATTAGCCGGATG | 59 | TGG | − | UACAAUAAAUUAGCCGGAUG | 3153 |
| AAACTTTTAGGAGTCAAAGT | 60 | GGG | + | AAACUUUUAGGAGUCAAAGU | 3154 |
| AAAACTTTTAGGAGTCAAAG | 61 | TGG | + | AAAACUUUUAGGAGUCAAAG | 3155 |
| AATGTTAACAGTGTTGGCTT | 62 | TGG | + | AAUGUUAACAGUGUUGGCUU | 3156 |
| GTGGTGGCTGCAGGTGAGGG | 63 | TGG | + | GUGGUGGCUGCAGGUGAGGG | 3157 |
| TACTAAAATGTTAACAGTGT | 64 | TGG | + | UACUAAAAUGUUAACAGUGU | 3158 |
| AAAAAAGGACTTGACATGCA | 65 | GGG | + | AAAAAAGGACUUGACAUGCA | 3159 |
| GTCCCAGCTTCTCTTGAGGG | 66 | TGG | + | GUCCCAGCUUCUCUUGAGGG | 3160 |
| GTTAACAGTGTTGGCTTTGG | 67 | TGG | + | GUUAACAGUGUUGGCUUUGG | 3161 |
| GTTGGTGGTCACTGACAGTG | 68 | TGG | − | GUUGGUGGUCACUGACAGUG | 3162 |
| GAAACTAGTGGCTACCGTAC | 69 | TGG | − | GAAACUAGUGGCUACCGUAC | 3163 |
| AAAAAACGTACAAAAGGGGC | 70 | CGG | − | AAAAAACGUACAAAAGGGGC | 3164 |
| AGCCCCAGGCCATCAACCGG | 71 | CGG | + | AGCCCCAGGCCAUCAACCGG | 3165 |
| GGCAGCCAGACAGATGCTTC | 72 | TGG | − | GGCAGCCAGACAGAUGCUUC | 3166 |
| CTGGAGAACAAAAGCATTTT | 73 | TGG | − | CUGGAGAACAAAAGCAUUUU | 3167 |
| ATCTTAGATTTATGCAATGT | 74 | GGG | − | AUCUUAGAUUUAUGCAAUGU | 3168 |
| ACAAGTAGAATCAGAATTCT | 75 | TGG | + | ACAAGUAGAAUCAGAAUUCU | 3169 |
| AATATCGGCTCACTGCAACC | 76 | CGG | + | AAUAUCGGCUCACUGCAACC | 3170 |
| CCCTCAAGAGAAGCTGGGAC | 77 | TGG | − | CCCUCAAGAGAAGCUGGGAC | 3171 |
| TCTTAGGAGATGACGAGGTT | 78 | GGG | − | UCUUAGGAGAUGACGAGGUU | 3172 |
| AATAATAAAGAACTAGAGAA | 79 | AGG | + | AAUAAUAAAGAACUAGAGAA | 3173 |
| AAAAACGTACAAAAGGGGCC | 80 | GGG | − | AAAAACGUACAAAAGGGGCC | 3174 |
| GGCTGAGCAGGCGGAGAAGT | 81 | AGG | + | GGCUGAGCAGGCGGAGAAGU | 3175 |
| AGAGAAAGGAGAACAGTCTG | 82 | AGG | + | AGAGAAAGGAGAACAGUCUG | 3176 |
| CTTCTTTCTCTTTCACGAGA | 83 | GGG | + | CUUCUUUCUCUUUCACGAGA | 3177 |
| AATCTTAGATTTATGCAATG | 84 | TGG | − | AAUCUUAGAUUUAUGCAAUG | 3178 |
| CTGAGCAGGCGGAGAAGTAG | 85 | GGG | + | CUGAGCAGGCGGAGAAGUAG | 3179 |
| ACCTAGTGTTGACAAGGCTG | 86 | TGG | − | ACCUAGUGUUGACAAGGCUG | 3180 |
| TCCCAGCTTCTCTTGAGGGT | 87 | GGG | + | UCCCAGCUUCUCUUGAGGGU | 3181 |
| AATAATTCTGTTGGGACGAC | 88 | AGG | + | AAUAAUUCUGUUGGGACGAC | 3182 |
| CCTATAAAGAGGACGTTTCC | 89 | TGG | − | CCUAUAAAGAGGACGUUUCC | 3183 |
| CCTTCTTTCTCTTTCACGAG | 90 | AGG | + | CCUUCUUUCUCUUUCACGAG | 3184 |
| CCCATCGAAGTACTCACCAT | 91 | GGG | + | CCCAUCGAAGUACUCACCAU | 3185 |
| GTGTCATATGTTGCTGGTGG | 92 | GGG | − | GUGUCAUAUGUUGCUGGUGG | 3186 |
| AATGTAAATGACGCGTTAAC | 93 | AGG | + | AAUGUAAAUGACGCGUUAAC | 3187 |
| GCCTTTGAGCCAAGTGGATT | 94 | TGG | + | GCCUUUGAGCCAAGUGGAUU | 3188 |
| GTCAGACTCTGTGCTGGCTG | 95 | AGG | − | GUCAGACUCUGUGCUGGCUG | 3189 |
| CCGTCAATAGCATTCCGGTT | 96 | TGG | − | CCGUCAAUAGCAUUCCGGUU | 3190 |
| CCATTAAAAAACGTACAAAA | 97 | GGG | − | CCAUUAAAAAACGUACAAAA | 3191 |
| GGGATTTGGGGAGGATGGGG | 98 | AGG | − | GGGAUUUGGGGAGGAUGGGG | 3192 |
| ACTGTGTCATATGTTGCTGG | 99 | TGG | − | ACUGUGUCAUAUGUUGCUGG | 3193 |
| TACAATGTTGTGGACCGGGC | 100 | TGG | − | UACAAUGUUGUGGACCGGGC | 3194 |
| GATAGAGTAGCAAACAAAAC | 101 | AGG | − | GAUAGAGUAGCAAACAAAAC | 3195 |
| GCTCTCAAAGGAGACTGAGA | 102 | AGG | + | GCUCUCAAAGGAGACUGAGA | 3196 |
| GGAAGAGCAAGGAGCTCCTG | 103 | AGG | − | GGAAGAGCAAGGAGCUCCUG | 3197 |
| TGTGTCATATGTTGCTGGTG | 104 | GGG | − | UGUGUCAUAUGUUGCUGGUG | 3198 |
| CTGAGAAGGTGTACCTAGAG | 105 | TGG | + | CUGAGAAGGUGUACCUAGAG | 3199 |
| GTCCGGGAGCCAGTTCCTGC | 106 | AGG | − | GUCCGGGAGCCAGUUCCUGC | 3200 |
| TTAGGAGATGACGAGGTTGG | 107 | GGG | − | UUAGGAGAUGACGAGGUUGG | 3201 |
| GGAGGAAGCAGAGCTCTCAA | 108 | AGG | + | GGAGGAAGCAGAGCUCUCAA | 3202 |
| AGTCATCAGCCTGGGAAACA | 109 | TGG | − | AGUCAUCAGCCUGGGAAACA | 3203 |
| TCCGGGAGCCAGTTCCTGCA | 110 | GGG | − | UCCGGGAGCCAGUUCCUGCA | 3204 |
| GAGCAAGGAGCTCCTGAGGC | 111 | TGG | − | GAGCAAGGAGCUCCUGAGGC | 3205 |
| TCTGGTACAATGTTGTGGAC | 112 | CGG | − | UCUGGUACAAUGUUGUGGAC | 3206 |
| CCTGGGAGTGTCTGACAACC | 113 | AGG | − | CCUGGGAGUGUCUGACAACC | 3207 |
| CCAGTTCCTGCAGGGCCTCG | 114 | TGG | − | CCAGUUCCUGCAGGGCCUCG | 3208 |
| TAGGGAATGGGCTGAGCAGG | 115 | CGG | + | UAGGGAAUGGGCUGAGCAGG | 3209 |
| AGCTTTCTGTCCCTGTGAGA | 116 | AGG | + | AGCUUUCUGUCCCUGUGAGA | 3210 |
| TCGTCTCCCTGCCTTCTCAC | 117 | AGG | − | UCGUCUCCCUGCCUUCUCAC | 3211 |
| CGAAGTACTCACCATGGGCA | 118 | TGG | + | CGAAGUACUCACCAUGGGCA | 3212 |
| AGGCCACTGGACCATGCCCA | 119 | TGG | − | AGGCCACUGGACCAUGCCCA | 3213 |
| GGCAGGGAGACGAGTCTAAT | 120 | GGG | + | GGCAGGGAGACGAGUCUAAU | 3214 |
| GGGCTTAGATTTATGCAATA | 121 | TGG | − | GGGCUUAGAUUUAUGCAAUA | 3215 |
| TTCAGCGAAGACAAGGGATT | 122 | TGG | − | UUCAGCGAAGACAAGGGAUU | 3216 |
| CATGGCCCACGAGGCCCTGC | 123 | AGG | + | CAUGGCCCACGAGGCCCUGC | 3217 |
| CAGTTCCTGCAGGGCCTCGT | 124 | GGG | − | CAGUUCCUGCAGGGCCUCGU | 3218 |
| CATTAAAAAACGTACAAAAG | 125 | GGG | − | CAUUAAAAAACGUACAAAAG | 3219 |
| AGGCAGGGAGACGAGTCTAA | 126 | TGG | + | AGGCAGGGAGACGAGUCUAA | 3220 |
| CTAACATCTGGATGAACCTG | 127 | AGG | − | CUAACAUCUGGAUGAACCUG | 3221 |
| CCAGTGGCCTGTCTTCTCCT | 128 | GGG | + | CCAGUGGCCUGUCUUCUCCU | 3222 |
| TATTACAAATACTGCCGCTA | 129 | TGG | + | UAUUACAAAUACUGCCGCUA | 3223 |
| GCAGGGAGACGAGTCTAATG | 130 | GGG | + | GCAGGGAGACGAGUCUAAUG | 3224 |
| CAATCTGCTTGAGAAACAGG | 131 | AGG | − | CAAUCUGCUUGAGAAACAGG | 3225 |
| GGCTTAGATTTATGCAATAT | 132 | GGG | − | GGCUUAGAUUUAUGCAAUAU | 3226 |
| ACACTCCCAGGGCTCACTCT | 133 | CGG | + | ACACUCCCAGGGCUCACUCU | 3227 |
| TATGGGCTCATTCTGCCCCT | 134 | TGG | − | UAUGGGCUCAUUCUGCCCCU | 3228 |
| CGAAGACAAGGGATTTGGGG | 135 | AGG | − | CGAAGACAAGGGAUUUGGGG | 3229 |
| AGCACAGAGTCTGACATTGA | 136 | GGG | + | AGCACAGAGUCUGACAUUGA | 3230 |
| GTCTTAGGAGATGACGAGGT | 137 | TGG | − | GUCUUAGGAGAUGACGAGGU | 3231 |
| GCTGAGCAGGCGGAGAAGTA | 138 | GGG | + | GCUGAGCAGGCGGAGAAGUA | 3232 |
| TTCCAATCTGCTTGAGAAAC | 139 | AGG | − | UUCCAAUCUGCUUGAGAAAC | 3233 |
| GAGATCATAATACATCTCAG | 140 | AGG | + | GAGAUCAUAAUACAUCUCAG | 3234 |
| GCCCATCGAAGTACTCACCA | 141 | TGG | + | GCCCAUCGAAGUACUCACCA | 3235 |
| CAGGCGGAGAAGTAGGGGTG | 142 | GGG | + | CAGGCGGAGAAGUAGGGGUG | 3236 |
| TTGAAACCCAGTCACCAATG | 143 | TGG | − | UUGAAACCCAGUCACCAAUG | 3237 |
| ACATAATCCAACTGAGAGTC | 144 | AGG | + | ACAUAAUCCAACUGAGAGUC | 3238 |
| GTGAGTGTACTGAGTCTCCG | 145 | AGG | − | GUGAGUGUACUGAGUCUCCG | 3239 |
| CAATGGAGTCACACAGCATG | 146 | TGG | + | CAAUGGAGUCACACAGCAUG | 3240 |
| GGGGTGGGGGGACGCATTTG | 147 | AGG | + | GGGGUGGGGGGACGCAUUUG | 3241 |
| AACTGAGAGTCAGGAAACCT | 148 | CGG | + | AACUGAGAGUCAGGAAACCU | 3242 |
| TGCTCACTTCCATAAGGATA | 149 | TGG | + | UGCUCACUUCCAUAAGGAUA | 3243 |
| ATTTGGGGAGGATGGGGAGG | 150 | AGG | − | AUUUGGGGAGGAUGGGGAGG | 3244 |
| CGGGCTGGCCACGGCAAGTG | 151 | TGG | − | CGGGCUGGCCACGGCAAGUG | 3245 |
| CTCAATGTCAGACTCTGTGC | 152 | TGG | − | CUCAAUGUCAGACUCUGUGC | 3246 |
| TGCAGACTATTAATTGCAAG | 153 | GGG | − | UGCAGACUAUUAAUUGCAAG | 3247 |
| ACAGGCGTGAGCCACGGGCC | 154 | TGG | + | ACAGGCGUGAGCCACGGGCC | 3248 |
| CATCAATTGTGCCAGGCCCG | 155 | TGG | − | CAUCAAUUGUGCCAGGCCCG | 3249 |
| CAGCACAGAGTCTGACATTG | 156 | AGG | + | CAGCACAGAGUCUGACAUUG | 3250 |
| GTTGCAGACTATTAATTGCA | 157 | AGG | − | GUUGCAGACUAUUAAUUGCA | 3251 |
| GCAAGTGTGGCAACAGGGTC | 158 | CGG | − | GCAAGUGUGGCAACAGGGUC | 3252 |
| TAGGGTCTTGGAGTTTTGAT | 159 | AGG | − | UAGGGUCUUGGAGUUUUGAU | 3253 |
| AAAGCCTCACATGGCCCACG | 160 | AGG | + | AAAGCCUCACAUGGCCCACG | 3254 |
| CCTCGAGGTGAGCGTGTGCT | 161 | TGG | − | CCUCGAGGUGAGCGUGUGCU | 3255 |
| GCAGGCGGAGAAGTAGGGGT | 162 | GGG | + | GCAGGCGGAGAAGUAGGGGU | 3256 |
| CATTTTTGTGGACAGTTGTG | 163 | TGG | + | CAUUUUUGUGGACAGUUGUG | 3257 |
| TTGCAGACTATTAATTGCAA | 164 | GGG | − | UUGCAGACUAUUAAUUGCAA | 3258 |
| CTGGTTGTCAGACACTCCCA | 165 | GGG | + | CUGGUUGUCAGACACUCCCA | 3259 |
| CAGCGAAGACAAGGGATTTG | 166 | GGG | − | CAGCGAAGACAAGGGAUUUG | 3260 |
| TCAGCGAAGACAAGGGATTT | 167 | GGG | − | UCAGCGAAGACAAGGGAUUU | 3261 |
| TGGATTTGAAAATAAGAAGT | 168 | TGG | + | UGGAUUUGAAAAUAAGAAGU | 3262 |
| AGGTTTAAAAATATTGGGTG | 169 | TGG | + | AGGUUUAAAAAUAUUGGGUG | 3263 |
| TTGGCCCAGGGTGGTGGCAG | 170 | TGG | − | UUGGCCCAGGGUGGUGGCAG | 3264 |
| ACAGAAAAAGCTGTCACCAA | 171 | AGG | − | ACAGAAAAAGCUGUCACCAA | 3265 |
| ACAAGGGATTTGGGGAGGAT | 172 | GGG | − | ACAAGGGAUUUGGGGAGGAU | 3266 |
| GGCAGCCCCAGGCCATCAAC | 173 | CGG | + | GGCAGCCCCAGGCCAUCAAC | 3267 |
| CAGGTTCCCAGCTGTACAAT | 174 | GGG | − | CAGGUUCCCAGCUGUACAAU | 3268 |
| AGGCGGAGAAGTAGGGGTGG | 175 | GGG | + | AGGCGGAGAAGUAGGGGUGG | 3269 |
| AGTGTGGTGGCTGCAGGTGA | 176 | GGG | + | AGUGUGGUGGCUGCAGGUGA | 3270 |
| AGCACATTGGGCAGACACAA | 177 | GGG | + | AGCACAUUGGGCAGACACAA | 3271 |
| CCACGAGGCCCTGCAGGAAC | 178 | TGG | + | CCACGAGGCCCUGCAGGAAC | 3272 |
| CGTCTCCCTGCCTTCTCACA | 179 | GGG | − | CGUCUCCCUGCCUUCUCACA | 3273 |
| AGATACTAATCCCATGTATG | 180 | AGG | + | AGAUACUAAUCCCAUGUAUG | 3274 |
| TTAGGCTTTGCCCTCATACA | 181 | TGG | − | UUAGGCUUUGCCCUCAUACA | 3275 |
| CTACTCGGGGGAGGCTGAAG | 182 | CGG | + | CUACUCGGGGGAGGCUGAAG | 3276 |
| ACCTCACTGCCTCAGCAGCG | 183 | TGG | + | ACCUCACUGCCUCAGCAGCG | 3277 |
| TTGAGGACCCAGGAGAAGAC | 184 | AGG | − | UUGAGGACCCAGGAGAAGAC | 3278 |
| CTTAGGAGATGACGAGGTTG | 185 | GGG | − | CUUAGGAGAUGACGAGGUUG | 3279 |
| GGCGGAGAAGTAGGGGTGGG | 186 | GGG | + | GGCGGAGAAGUAGGGGUGGG | 3280 |
| CTGGTACAATGTTGTGGACC | 187 | GGG | − | CUGGUACAAUGUUGUGGACC | 3281 |
| GGCAAAGCATTCTGGGCAGA | 188 | GGG | − | GGCAAAGCAUUCUGGGCAGA | 3282 |
| GAAAATTACGGTGACTGCTG | 189 | TGG | − | GAAAAUUACGGUGACUGCUG | 3283 |
| GGACCAACCTAGTGTTGACA | 190 | AGG | − | GGACCAACCUAGUGUUGACA | 3284 |
| GCTTTTGTTCTCCAGTTTGT | 191 | TGG | + | GCUUUUGUUCUCCAGUUUGU | 3285 |
| TGATTTAATCACCAACAAAC | 192 | TGG | − | UGAUUUAAUCACCAACAAAC | 3286 |
| ATTTAGCAATGTTTACTGGG | 193 | TGG | + | AUUUAGCAAUGUUUACUGGG | 3287 |
| GGCATTGAATCCAATATGTG | 194 | CGG | − | GGCAUUGAAUCCAAUAUGUG | 3288 |
| GTGTTACCATCAGAGATTGC | 195 | AGG | + | GUGUUACCAUCAGAGAUUGC | 3289 |
| GTAGGCCATTCAGTGCTTAC | 196 | TGG | + | GUAGGCCAUUCAGUGCUUAC | 3290 |
| TTTGAAAATAAGAAGTTGGC | 197 | TGG | + | UUUGAAAAUAAGAAGUUGGC | 3291 |
| CACCTCGTTCCGCCGGTTGA | 198 | TGG | − | CACCUCGUUCCGCCGGUUGA | 3292 |
| ACACGCTCACCTCGAGGGCT | 199 | TGG | + | ACACGCUCACCUCGAGGGCU | 3293 |
| GATATCCAGTAAGCACTGAA | 200 | TGG | − | GAUAUCCAGUAAGCACUGAA | 3294 |
| TGGATTTAGCAATGTTTACT | 201 | GGG | + | UGGAUUUAGCAAUGUUUACU | 3295 |
| TAAAGAGGACGTTTCCTGGC | 202 | CGG | − | UAAAGAGGACGUUUCCUGGC | 3296 |
| TTAATCTGTCTTTTGTCGTA | 203 | GGG | − | UUAAUCUGUCUUUUGUCGUA | 3297 |
| ATAGGAAATGCCTTACTGTG | 204 | AGG | − | AUAGGAAAUGCCUUACUGUG | 3298 |
| CTTACTGGATATCTGAACCT | 205 | TGG | + | CUUACUGGAUAUCUGAACCU | 3299 |
| AGTAAACATTGCTAAATCCA | 206 | AGG | − | AGUAAACAUUGCUAAAUCCA | 3300 |
| GGGTTCTTGCCTTGGGGTAT | 207 | CGG | − | GGGUUCUUGCCUUGGGGUAU | 3301 |
| GTGAGGCTTTGTGGAACTTG | 208 | AGG | − | GUGAGGCUUUGUGGAACUUG | 3302 |
| ACATCTTACTACTACCACAT | 209 | TGG | + | ACAUCUUACUACUACCACAU | 3303 |
| CCACCAACACCCCTTGCCTT | 210 | TGG | + | CCACCAACACCCCUUGCCUU | 3304 |
| TTTTTGGGAGACCAAAGGCA | 211 | AGG | − | UUUUUGGGAGACCAAAGGCA | 3305 |
| TTTCATCCTCCACGCTGCTG | 212 | AGG | − | UUUCAUCCUCCACGCUGCUG | 3306 |
| TCAGAGCCACATGAAACTAG | 213 | TGG | − | UCAGAGCCACAUGAAACUAG | 3307 |
| TCCATTAAAAAACGTACAAA | 214 | AGG | − | UCCAUUAAAAAACGUACAAA | 3308 |
| AAAAAAAGGACTTGACATGC | 215 | AGG | + | AAAAAAAGGACUUGACAUGC | 3309 |
| GCTCCTGAGGCTGGAGCTAG | 216 | AGG | − | GCUCCUGAGGCUGGAGCUAG | 3310 |
| AGAAGGTGTACCTAGAGTGG | 217 | TGG | + | AGAAGGUGUACCUAGAGUGG | 3311 |
| GGTGCCAGCAGATTTGGGTC | 218 | TGG | + | GGUGCCAGCAGAUUUGGGUC | 3312 |
| GATACTAATCCCATGTATGA | 219 | GGG | + | GAUACUAAUCCCAUGUAUGA | 3313 |
| GAAATCCGAGAGTGAGCCCT | 220 | GGG | − | GAAAUCCGAGAGUGAGCCCU | 3314 |
| AAAACCCCTGCAATCTCTGA | 221 | TGG | − | AAAACCCCUGCAAUCUCUGA | 3315 |
| TAATAATATTTATATTATTC | 222 | AGG | − | UAAUAAUAUUUAUAUUAUUC | 3316 |
| AGAAAAGAAATGCAAGAAAT | 223 | GGG | + | AGAAAAGAAAUGCAAGAAAU | 3317 |
| TGAACTGTGTCATATGTTGC | 224 | TGG | − | UGAACUGUGUCAUAUGUUGC | 3318 |
| CAGAAAGCTTTCTGTATCTC | 225 | AGG | − | CAGAAAGCUUUCUGUAUCUC | 3319 |
| AGAAGCTGGGACTGGCTGTG | 226 | AGG | − | AGAAGCUGGGACUGGCUGUG | 3320 |
| CTTCTCTTGAGGGTGGGGAT | 227 | GGG | + | CUUCUCUUGAGGGUGGGGAU | 3321 |
| GCCCAGAATGCTTTGCCCAC | 228 | AGG | + | GCCCAGAAUGCUUUGCCCAC | 3322 |
| AGCAGGCGGAGAAGTAGGGG | 229 | TGG | + | AGCAGGCGGAGAAGUAGGGG | 3323 |
| TCTCCTCTAGCTCCAGCCTC | 230 | AGG | + | UCUCCUCUAGCUCCAGCCUC | 3324 |
| GGTTAAATGAAAGGGAAAGC | 231 | AGG | + | GGUUAAAUGAAAGGGAAAGC | 3325 |
| CTAAAGCGCGCCTTTCCTCA | 232 | TGG | + | CUAAAGCGCGCCUUUCCUCA | 3326 |
| AGAAGATGCTGGCTTGGCCC | 233 | AGG | − | AGAAGAUGCUGGCUUGGCCC | 3327 |
| CAGGAGCTCCTTGCTCTTCC | 234 | TGG | + | CAGGAGCUCCUUGCUCUUCC | 3328 |
| CTGTGTCATATGTTGCTGGT | 235 | GGG | − | CUGUGUCAUAUGUUGCUGGU | 3329 |
| TAGCACATTGGGCAGACACA | 236 | AGG | + | UAGCACAUUGGGCAGACACA | 3330 |
| GAAGCATATCACTTCTGCTA | 237 | GGG | − | GAAGCAUAUCACUUCUGCUA | 3331 |
| GTTGTGGACCGGGCTGGCCA | 238 | CGG | − | GUUGUGGACCGGGCUGGCCA | 3332 |
| TCCAGTGGCCTGTCTTCTCC | 239 | TGG | + | UCCAGUGGCCUGUCUUCUCC | 3333 |
| AATTTCCTGCTGTGACAACA | 240 | AGG | + | AAUUUCCUGCUGUGACAACA | 3334 |
| CAAGGGATTTGGGGAGGATG | 241 | GGG | − | CAAGGGAUUUGGGGAGGAUG | 3335 |
| AGGAAGTAGGGAACAGGGAC | 242 | TGG | − | AGGAAGUAGGGAACAGGGAC | 3336 |
| ACCTCCATCTCTATAAAAAT | 243 | AGG | + | ACCUCCAUCUCUAUAAAAAU | 3337 |
| TTACTTCTCTTTGGCTATGA | 244 | AGG | + | UUACUUCUCUUUGGCUAUGA | 3338 |
| TCCCACTGGCCCACGTTGCA | 245 | GGG | − | UCCCACUGGCCCACGUUGCA | 3339 |
| CAGCCATGTTGCTTCTCCTT | 246 | TGG | + | CAGCCAUGUUGCUUCUCCUU | 3340 |
| TATTTTTCTCCCTGTTTAGA | 247 | TGG | − | UAUUUUUCUCCCUGUUUAGA | 3341 |
| GGGCAAAGCATTCTGGGCAG | 248 | AGG | − | GGGCAAAGCAUUCUGGGCAG | 3342 |
| GAAGGAGGCGAGACACCTGT | 249 | GGG | − | GAAGGAGGCGAGACACCUGU | 3343 |
| ATTTCCTGCTGTGACAACAA | 250 | GGG | + | AUUUCCUGCUGUGACAACAA | 3344 |
| AAGAAAAGAAATGCAAGAAA | 251 | TGG | + | AAGAAAAGAAAUGCAAGAAA | 3345 |
| GCTTCTCTTGAGGGTGGGGA | 252 | TGG | + | GCUUCUCUUGAGGGUGGGGA | 3346 |
| ATTAATCTGTCTTTTGTCGT | 253 | AGG | − | AUUAAUCUGUCUUUUGUCGU | 3347 |
| ACAGGAGGAACGCACGCAGC | 254 | AGG | − | ACAGGAGGAACGCACGCAGC | 3348 |
| CCTGGTTGTCAGACACTCCC | 255 | AGG | + | CCUGGUUGUCAGACACUCCC | 3349 |
| AGGTCAACATCAATTGTGCC | 256 | AGG | − | AGGUCAACAUCAAUUGUGCC | 3350 |
| GACAAGGGATTTGGGGAGGA | 257 | TGG | − | GACAAGGGAUUUGGGGAGGA | 3351 |
| GGCTTAGATCTAAATACTCC | 258 | TGG | + | GGCUUAGAUCUAAAUACUCC | 3352 |
| GAGCACACAGCCTCACAGTA | 259 | AGG | + | GAGCACACAGCCUCACAGUA | 3353 |
| GTTACCATCAGAGATTGCAG | 260 | GGG | + | GUUACCAUCAGAGAUUGCAG | 3354 |
| TTGGATTTAGCAATGTTTAC | 261 | TGG | + | UUGGAUUUAGCAAUGUUUAC | 3355 |
| CTTGGAGTTTTGATAGGCAC | 262 | AGG | − | CUUGGAGUUUUGAUAGGCAC | 3356 |
| ATTTAATAAAAGAGAAACCT | 263 | TGG | + | AUUUAAUAAAAGAGAAACCU | 3357 |
| TTTAATAAAAGAGAAACCTT | 264 | GGG | + | UUUAAUAAAAGAGAAACCUU | 3358 |
| ATTAAAAAGCAGGGAGAAGG | 265 | AGG | + | AUUAAAAAGCAGGGAGAAGG | 3359 |
| GAGTTCCAGAAGCATCTGTC | 266 | TGG | + | GAGUUCCAGAAGCAUCUGUC | 3360 |
| GAAGATGCTGGCTTGGCCCA | 267 | GGG | − | GAAGAUGCUGGCUUGGCCCA | 3361 |
| GCTAGAGGAGAGAGAGTCTT | 268 | AGG | − | GCUAGAGGAGAGAGAGUCUU | 3362 |
| CGAAGGAGGCGAGACACCTG | 269 | TGG | − | CGAAGGAGGCGAGACACCUG | 3363 |
| GACAAACAGCCTTTGTCTTC | 270 | AGG | − | GACAAACAGCCUUUGUCUUC | 3364 |
| TATTGGATTCAATGCCAATA | 271 | AGG | + | UAUUGGAUUCAAUGCCAAUA | 3365 |
| TCCCCACCCTCAAGAGAAGC | 272 | TGG | − | UCCCCACCCUCAAGAGAAGC | 3366 |
| TCACAGCAGAGTGGCCCTTT | 273 | TGG | + | UCACAGCAGAGUGGCCCUUU | 3367 |
| GATTGAGAGGGAATTGGAAC | 274 | TGG | − | GAUUGAGAGGGAAUUGGAAC | 3368 |
| TTTTGGGAGACCAAAGGCAA | 275 | GGG | − | UUUUGGGAGACCAAAGGCAA | 3369 |
| CCCAGCTTCTCTTGAGGGTG | 276 | GGG | + | CCCAGCUUCUCUUGAGGGUG | 3370 |
| GACTGCACTCACCTCGGAAC | 277 | CGG | + | GACUGCACUCACCUCGGAAC | 3371 |
| GGCAACAGGGTCCGGTTCCG | 278 | AGG | − | GGCAACAGGGUCCGGUUCCG | 3372 |
| TGACGAGGTTGGGGGTGTCC | 279 | GGG | − | UGACGAGGUUGGGGGUGUCC | 3373 |
| TAGGCTTTGCCCTCATACAT | 280 | GGG | − | UAGGCUUUGCCCUCAUACAU | 3374 |
| TGAAGCATATCACTTCTGCT | 281 | AGG | − | UGAAGCAUAUCACUUCUGCU | 3375 |
| AATCAGAATTCTTGGTTTCA | 282 | CGG | + | AAUCAGAAUUCUUGGUUUCA | 3376 |
| GATGTTCTAAAAATCCTTAT | 283 | TGG | − | GAUGUUCUAAAAAUCCUUAU | 3377 |
| AGACAAATGCTTTCTGCGGG | 284 | AGG | + | AGACAAAUGCUUUCUGCGGG | 3378 |
| TGTTACCATCAGAGATTGCA | 285 | GGG | + | UGUUACCAUCAGAGAUUGCA | 3379 |
| CCCGCCAAAGCGTTTTGCGC | 286 | AGG | + | CCCGCCAAAGCGUUUUGCGC | 3380 |
| CAGTTGTGTGGAAATATGAT | 287 | TGG | + | CAGUUGUGUGGAAAUAUGAU | 3381 |
| ACGATGTCCACAAAGAAGAC | 288 | AGG | − | ACGAUGUCCACAAAGAAGAC | 3382 |
| TTAGGCGACAGGCATATTCA | 289 | TGG | − | UUAGGCGACAGGCAUAUUCA | 3383 |
| GCTGGTTTAAAGCACTGATG | 290 | GGG | − | GCUGGUUUAAAGCACUGAUG | 3384 |
| CCAGGAAACGTCCTCTTTAT | 291 | AGG | + | CCAGGAAACGUCCUCUUUAU | 3385 |
| TCAGCCCATTCCCTATAAAG | 292 | AGG | − | UCAGCCCAUUCCCUAUAAAG | 3386 |
| AGAAAGCTTTCTGTATCTCA | 293 | GGG | − | AGAAAGCUUUCUGUAUCUCA | 3387 |
| ACTTATTAAATAAGTATGGA | 294 | TGG | − | ACUUAUUAAAUAAGUAUGGA | 3388 |
| ATTGGATTGCACCCAGGAAT | 295 | TGG | + | AUUGGAUUGCACCCAGGAAU | 3389 |
| TGCTTTCAGAGCCAATTCCT | 296 | GGG | − | UGCUUUCAGAGCCAAUUCCU | 3390 |
| TTCTGCCCCTTGGTCCAAAA | 297 | GGG | − | UUCUGCCCCUUGGUCCAAAA | 3391 |
| CAAATGGTGAGCTGAGGGAC | 298 | AGG | + | CAAAUGGUGAGCUGAGGGAC | 3392 |
| CCTTTAGCTTCCACCACTCT | 299 | AGG | − | CCUUUAGCUUCCACCACUCU | 3393 |
| AGGTCAACCTAGTTTAAATA | 300 | TGG | + | AGGUCAACCUAGUUUAAAUA | 3394 |
| TTGGTTGCCTGTCTTCTTTG | 301 | TGG | + | UUGGUUGCCUGUCUUCUUUG | 3395 |
| AGAAATCCGAGAGTGAGCCC | 302 | TGG | − | AGAAAUCCGAGAGUGAGCCC | 3396 |
| ACTGCAACCTTCCGCCCGCC | 303 | TGG | + | ACUGCAACCUUCCGCCCGCC | 3397 |
| ATCGATTGAACCCAGGCGGG | 304 | CGG | − | AUCGAUUGAACCCAGGCGGG | 3398 |
| TAGGCGACAGGCATATTCAT | 305 | GGG | − | UAGGCGACAGGCAUAUUCAU | 3399 |
| GGCGTGTTCCAGGAAGAGCA | 306 | AGG | − | GGCGUGUUCCAGGAAGAGCA | 3400 |
| CAAGCACACGCTCACCTCGA | 307 | GGG | + | CAAGCACACGCUCACCUCGA | 3401 |
| TTTATTATTATATGCATCAT | 308 | AGG | + | UUUAUUAUUAUAUGCAUCAU | 3402 |
| ATCTCAGGGTTCTTGCCTTG | 309 | GGG | − | AUCUCAGGGUUCUUGCCUUG | 3403 |
| CTTATTTAATAAGTTTTACA | 310 | TGG | + | CUUAUUUAAUAAGUUUUACA | 3404 |
| GGCAACCAATTTCTAACATC | 311 | TGG | − | GGCAACCAAUUUCUAACAUC | 3405 |
| AGAAGCAGTGGAGGGTAAAT | 312 | TGG | − | AGAAGCAGUGGAGGGUAAAU | 3406 |
| ATCACAGAAGCCATCTAAAC | 313 | AGG | + | AUCACAGAAGCCAUCUAAAC | 3407 |
| GCTGGCTTGGCCCAGGGTGG | 314 | TGG | − | GCUGGCUUGGCCCAGGGUGG | 3408 |
| TTTAGCAATGTTTACTGGGT | 315 | GGG | + | UUUAGCAAUGUUUACUGGGU | 3409 |
| CTGTTTGTTCAGATTCGTGT | 316 | TGG | + | CUGUUUGUUCAGAUUCGUGU | 3410 |
| ACTGAGAAAACTGCAGAAGC | 317 | AGG | − | ACUGAGAAAACUGCAGAAGC | 3411 |
| TAAATTAATTAAAATTGGCC | 318 | GGG | − | UAAAUUAAUUAAAAUUGGCC | 3412 |
| TCTCCAGGTGCCCTGCAACG | 319 | TGG | + | UCUCCAGGUGCCCUGCAACG | 3413 |
| TTCCCACTGGCCCACGTTGC | 320 | AGG | − | UUCCCACUGGCCCACGUUGC | 3414 |
| TCGCTTAGCATATGTGGTTG | 321 | AGG | + | UCGCUUAGCAUAUGUGGUUG | 3415 |
| GATGCTTCTGGAACTCAAGG | 322 | GGG | − | GAUGCUUCUGGAACUCAAGG | 3416 |
| CAGCATGTGCCAAGCCCTCG | 323 | AGG | − | CAGCAUGUGCCAAGCCCUCG | 3417 |
| TCACAACAACTTCGGCCTCC | 324 | TGG | − | UCACAACAACUUCGGCCUCC | 3418 |
| ATCATCGCAGAAGGTTGCAT | 325 | TGG | − | AUCAUCGCAGAAGGUUGCAU | 3419 |
| GGCCTTTAACAGCACTTGAA | 326 | AGG | + | GGCCUUUAACAGCACUUGAA | 3420 |
| CGAGGCGGGCAAACCACTTG | 327 | AGG | − | CGAGGCGGGCAAACCACUUG | 3421 |
| TCTGAAGGGCCCTGTCAGTT | 328 | AGG | − | UCUGAAGGGCCCUGUCAGUU | 3422 |
| AGAAATATCTCAGCCTCTAA | 329 | AGG | − | AGAAAUAUCUCAGCCUCUAA | 3423 |
| GATGCTGGCTTGGCCCAGGG | 330 | TGG | − | GAUGCUGGCUUGGCCCAGGG | 3424 |
| CCACGGCAAGTGTGGCAACA | 331 | GGG | − | CCACGGCAAGUGUGGCAACA | 3425 |
| CCAAGCACACGCTCACCTCG | 332 | AGG | + | CCAAGCACACGCUCACCUCG | 3426 |
| CATCTTCACACCGCAATGTT | 333 | GGG | − | CAUCUUCACACCGCAAUGUU | 3427 |
| TTGTGTGGAAATATGATTGG | 334 | AGG | + | UUGUGUGGAAAUAUGAUUGG | 3428 |
| CTGCTTAGATTTTCTTGCTG | 335 | AGG | − | CUGCUUAGAUUUUCUUGCUG | 3429 |
| CTCCAGGTGCCCTGCAACGT | 336 | GGG | + | CUCCAGGUGCCCUGCAACGU | 3430 |
| GATGCATCCCATTGTACAGC | 337 | TGG | + | GAUGCAUCCCAUUGUACAGC | 3431 |
| GAAGGTTTCAGCGAAGACAA | 338 | GGG | − | GAAGGUUUCAGCGAAGACAA | 3432 |
| GTAGTGCCCACAGGATCTGC | 339 | GGG | − | GUAGUGCCCACAGGAUCUGC | 3433 |
| TCAGGTTCCCAGCTGTACAA | 340 | TGG | − | UCAGGUUCCCAGCUGUACAA | 3434 |
| TCCAAAATTGGATTGCACCC | 341 | AGG | + | UCCAAAAUUGGAUUGCACCC | 3435 |
| CTCCCTCTGGTACAATGTTG | 342 | TGG | − | CUCCCUCUGGUACAAUGUUG | 3436 |
| CACCTGTGGGCAAAGCATTC | 343 | TGG | − | CACCUGUGGGCAAAGCAUUC | 3437 |
| AGGACCATCCAGGGCAAATT | 344 | GGG | + | AGGACCAUCCAGGGCAAAUU | 3438 |
| AGTAACAAAAGTCATCAGCC | 345 | TGG | − | AGUAACAAAAGUCAUCAGCC | 3439 |
| CTGCAACCTTCCGCCCGCCT | 346 | GGG | + | CUGCAACCUUCCGCCCGCCU | 3440 |
| ACAGATGCTTCTGGAACTCA | 347 | AGG | − | ACAGAUGCUUCUGGAACUCA | 3441 |
| GGGCGGGCGGAAGGGGAAGA | 348 | AGG | − | GGGCGGGCGGAAGGGGAAGA | 3442 |
| CCCTGTTGCCACACTTGCCG | 349 | TGG | + | CCCUGUUGCCACACUUGCCG | 3443 |
| CGTTTCCTGGCCGGACGCAG | 350 | TGG | − | CGUUUCCUGGCCGGACGCAG | 3444 |
| CAGCCTTGTCAACACTAGGT | 351 | TGG | + | CAGCCUUGUCAACACUAGGU | 3445 |
| GGACCATCCAGGGCAAATTG | 352 | GGG | + | GGACCAUCCAGGGCAAAUUG | 3446 |
| GTAACAAAAGTCATCAGCCT | 353 | GGG | − | GUAACAAAAGUCAUCAGCCU | 3447 |
| ATGCATCCCATTGTACAGCT | 354 | GGG | + | AUGCAUCCCAUUGUACAGCU | 3448 |
| TCTCGCTGTGTTGCTCAGGG | 355 | TGG | + | UCUCGCUGUGUUGCUCAGGG | 3449 |
| ACTGGGGAAGTAGTGCCCAC | 356 | AGG | − | ACUGGGGAAGUAGUGCCCAC | 3450 |
| GCTGAAGCAGATACACCACA | 357 | TGG | − | GCUGAAGCAGAUACACCACA | 3451 |
| ACTGACAGCACCCAACATTG | 358 | CGG | + | ACUGACAGCACCCAACAUUG | 3452 |
| CCATCTTCACACCGCAATGT | 359 | TGG | − | CCAUCUUCACACCGCAAUGU | 3453 |
| TACAGTGGACACAAAAAAAG | 360 | TGG | + | UACAGUGGACACAAAAAAAG | 3454 |
| GAGTCTCGCTGTGTTGCTCA | 361 | GGG | + | GAGUCUCGCUGUGUUGCUCA | 3455 |
| ATTACTGACCACAGTTTCAA | 362 | AGG | − | AUUACUGACCACAGUUUCAA | 3456 |
| ATGTGCTAGATGATCCATAG | 363 | CGG | − | AUGUGCUAGAUGAUCCAUAG | 3457 |
| TATCCAGATGGAGATGCATA | 364 | AGG | + | UAUCCAGAUGGAGAUGCAUA | 3458 |
| TCTGAGGTACCATATCCTTA | 365 | TGG | − | UCUGAGGUACCAUAUCCUUA | 3459 |
| CAGGAAACGTCCTCTTTATA | 366 | GGG | + | CAGGAAACGUCCUCUUUAUA | 3460 |
| AATTGCCTTCACTTAGGCGT | 367 | TGG | + | AAUUGCCUUCACUUAGGCGU | 3461 |
| AGAGGGAGCCTTTGAAACTG | 368 | TGG | + | AGAGGGAGCCUUUGAAACUG | 3462 |
| GCGTGTGCTTGGCGTGTTCC | 369 | AGG | − | GCGUGUGCUUGGCGUGUUCC | 3463 |
| TTGAAAATAAGAAGTTGGCT | 370 | GGG | + | UUGAAAAUAAGAAGUUGGCU | 3464 |
| ATCTGCGGGCAGATTACGCG | 371 | TGG | − | AUCUGCGGGCAGAUUACGCG | 3465 |
| GTAAGCACTGAATGGCCTAC | 372 | AGG | − | GUAAGCACUGAAUGGCCUAC | 3466 |
| CAGGACCATCCAGGGCAAAT | 373 | TGG | + | CAGGACCAUCCAGGGCAAAU | 3467 |
| ATTCTGCCCCTTGGTCCAAA | 374 | AGG | − | AUUCUGCCCCUUGGUCCAAA | 3468 |
| ATGCATAAGGCCCATAGACA | 375 | TGG | + | AUGCAUAAGGCCCAUAGACA | 3469 |
| ATGCATCTTTCCCATGTCTA | 376 | TGG | − | AUGCAUCUUUCCCAUGUCUA | 3470 |
| TCCTGGGTGCAATCCAATTT | 377 | TGG | − | UCCUGGGUGCAAUCCAAUUU | 3471 |
| GCCTTTCCTCATGGGTTGCA | 378 | AGG | + | GCCUUUCCUCAUGGGUUGCA | 3472 |
| AGAGCTGCCATTTGCGGGGC | 379 | GGG | − | AGAGCUGCCAUUUGCGGGGC | 3473 |
| ACACCCCAATTTGCCCTGGA | 380 | TGG | − | ACACCCCAAUUUGCCCUGGA | 3474 |
| TTTCGCTGTGTCTGTCTACC | 381 | AGG | − | UUUCGCUGUGUCUGUCUACC | 3475 |
| TTACAAAAATGATCCGGGCG | 382 | TGG | − | UUACAAAAAUGAUCCGGGCG | 3476 |
| CTGCTTTCAGAGCCAATTCC | 383 | TGG | − | CUGCUUUCAGAGCCAAUUCC | 3477 |
| CCCCACCCTCAAGAGAAGCT | 384 | GGG | − | CCCCACCCUCAAGAGAAGCU | 3478 |
| GGTTGCCCAGGGGCTGGGGG | 385 | AGG | − | GGUUGCCCAGGGGCUGGGGG | 3479 |
| GTCCACAACATTGTACCAGA | 386 | GGG | + | GUCCACAACAUUGUACCAGA | 3480 |
| ACCTGTGGGCAAAGCATTCT | 387 | GGG | − | ACCUGUGGGCAAAGCAUUCU | 3481 |
| TTCCAAGTAGCTCGGATCAC | 388 | AGG | + | UUCCAAGUAGCUCGGAUCAC | 3482 |
| CAGTGTGGTGGCTGCAGGTG | 389 | AGG | + | CAGUGUGGUGGCUGCAGGUG | 3483 |
| ATTTTCCCACATTATGTATA | 390 | TGG | + | AUUUUCCCACAUUAUGUAUA | 3484 |
| GGGATGAGCTCTTAAAAGAA | 391 | GGG | − | GGGAUGAGCUCUUAAAAGAA | 3485 |
| TAGAATTTAATATTCCAAAC | 392 | CGG | + | UAGAAUUUAAUAUUCCAAAC | 3486 |
| GAGGTTTCCTGACTCTCAGT | 393 | TGG | − | GAGGUUUCCUGACUCUCAGU | 3487 |
| AATCTAAGCAGACTCTTTCA | 394 | AGG | + | AAUCUAAGCAGACUCUUUCA | 3488 |
| TTTGGGAGACCAAAGGCAAG | 395 | GGG | − | UUUGGGAGACCAAAGGCAAG | 3489 |
| AATGTACCTTGCAACCCATG | 396 | AGG | − | AAUGUACCUUGCAACCCAUG | 3490 |
| AGTGAAATATTTCGATTATG | 397 | TGG | − | AGUGAAAUAUUUCGAUUAUG | 3491 |
| CAGATGCTTCTGGAACTCAA | 398 | GGG | − | CAGAUGCUUCUGGAACUCAA | 3492 |
| AGTAGTGCCCACAGGATCTG | 399 | CGG | − | AGUAGUGCCCACAGGAUCUG | 3493 |
| CTCCTGGGCCCTTGTTCCAC | 400 | TGG | − | CUCCUGGGCCCUUGUUCCAC | 3494 |
| TAATAAGTTTTACATGGCAC | 401 | AGG | + | UAAUAAGUUUUACAUGGCAC | 3495 |
| TCTGCTCAGAATTTCTCCTC | 402 | AGG | + | UCUGCUCAGAAUUUCUCCUC | 3496 |
| AGGAGGGGGCAAGGAGTAAA | 403 | AGG | − | AGGAGGGGGCAAGGAGUAAA | 3497 |
| TAGAGCTGCCATTTGCGGGG | 404 | CGG | − | UAGAGCUGCCAUUUGCGGGG | 3498 |
| ACAGTTTCAAAGGCTCCCTC | 405 | TGG | − | ACAGUUUCAAAGGCUCCCUC | 3499 |
| CGGTAGCCACTAGTTTCATG | 406 | TGG | + | CGGUAGCCACUAGUUUCAUG | 3500 |
| CCTTACACCCCAATTTGCCC | 407 | TGG | − | CCUUACACCCCAAUUUGCCC | 3501 |
| AAGAAATACAATAAATTAGC | 408 | CGG | − | AAGAAAUACAAUAAAUUAGC | 3502 |
| CTAAACCTGAGTGTAAAAAA | 409 | TGG | − | CUAAACCUGAGUGUAAAAAA | 3503 |
| CCAGTCCCAGCTTCTCTTGA | 410 | GGG | + | CCAGUCCCAGCUUCUCUUGA | 3504 |
| AGAAACGGAAGTCTGAGGCT | 411 | GGG | − | AGAAACGGAAGUCUGAGGCU | 3505 |
| CCCAGGAGAAGACAGGCCAC | 412 | TGG | − | CCCAGGAGAAGACAGGCCAC | 3506 |
| AAGTCGATCCGTGGTTGCCC | 413 | AGG | − | AAGUCGAUCCGUGGUUGCCC | 3507 |
| AAGAAACGGAAGTCTGAGGC | 414 | TGG | − | AAGAAACGGAAGUCUGAGGC | 3508 |
| GCCACGGCAAGTGTGGCAAC | 415 | AGG | − | GCCACGGCAAGUGUGGCAAC | 3509 |
| ATGACGAGGTTGGGGGTGTC | 416 | CGG | − | AUGACGAGGUUGGGGGUGUC | 3510 |
| AAAGCCTAATCACCTCCCAA | 417 | AGG | + | AAAGCCUAAUCACCUCCCAA | 3511 |
| GGTCTCCCAAAAAGAGGATC | 418 | TGG | + | GGUCUCCCAAAAAGAGGAUC | 3512 |
| TAGGTTTGATGGCCTGCTTC | 419 | AGG | + | UAGGUUUGAUGGCCUGCUUC | 3513 |
| CTTGGCGCTATACTAGGACT | 420 | GGG | − | CUUGGCGCUAUACUAGGACU | 3514 |
| GGAAACGCTACCATCAAATA | 421 | TGG | − | GGAAACGCUACCAUCAAAUA | 3515 |
| CCTACTGTGTGCCCTACCCT | 422 | GGG | + | CCUACUGUGUGCCCUACCCU | 3516 |
| CATCCCTCTGGCCCAGGGTA | 423 | GGG | − | CAUCCCUCUGGCCCAGGGUA | 3517 |
| TGGAGCATCCCTCTGGCCCA | 424 | GGG | − | UGGAGCAUCCCUCUGGCCCA | 3518 |
| TGTAGATGCTCTGCTTTTGA | 425 | TGG | + | UGUAGAUGCUCUGCUUUUGA | 3519 |
| GTAGTCCCAGCTACCATGGG | 426 | AGG | + | GUAGUCCCAGCUACCAUGGG | 3520 |
| GCTTGGCGCTATACTAGGAC | 427 | TGG | − | GCUUGGCGCUAUACUAGGAC | 3521 |
| AAAAAAACAAGTCTGGGAAA | 428 | TGG | + | AAAAAAACAAGUCUGGGAAA | 3522 |
| TGCCCCCTCCCTCCTGAAGC | 429 | TGG | − | UGCCCCCUCCCUCCUGAAGC | 3523 |
| CTAAAATTACAAAAATGATC | 430 | CGG | − | CUAAAAUUACAAAAAUGAUC | 3524 |
| TCTCTCTGCTCACTTCCATA | 431 | AGG | + | UCUCUCUGCUCACUUCCAUA | 3525 |
| TCCTCTTTTTGGGAGACCAA | 432 | AGG | − | UCCUCUUUUUGGGAGACCAA | 3526 |
| TCACAGAAGCCATCTAAACA | 433 | GGG | + | UCACAGAAGCCAUCUAAACA | 3527 |
| AATGTTTACTGGGTGGGTGG | 434 | AGG | + | AAUGUUUACUGGGUGGGUGG | 3528 |
| GCGCACATGTCTCTTAGCCT | 435 | AGG | − | GCGCACAUGUCUCUUAGCCU | 3529 |
| TGCTGGTTTAAAGCACTGAT | 436 | GGG | − | UGCUGGUUUAAAGCACUGAU | 3530 |
| GCCTTTGGTCTCCCAAAAAG | 437 | AGG | + | GCCUUUGGUCUCCCAAAAAG | 3531 |
| CAGTGCCAGATCCTCTTTTT | 438 | GGG | − | CAGUGCCAGAUCCUCUUUUU | 3532 |
| CGGGCAGATTACGCGTGGCA | 439 | GGG | − | CGGGCAGAUUACGCGUGGCA | 3533 |
| GAGAGTCTTAGGAGATGACG | 440 | AGG | − | GAGAGUCUUAGGAGAUGACG | 3534 |
| AAGGGGCAAGCTAGTGATAC | 441 | TGG | + | AAGGGGCAAGCUAGUGAUAC | 3535 |
| GTGGAGTTTGGCCAGGCTGT | 442 | CGG | + | GUGGAGUUUGGCCAGGCUGU | 3536 |
| CCCACTCTTCTCCGACAGCC | 443 | TGG | − | CCCACUCUUCUCCGACAGCC | 3537 |
| ATATGGCACCTGGACACACA | 444 | AGG | − | AUAUGGCACCUGGACACACA | 3538 |
| GCATTTGTCTGTAGACAGCC | 445 | TGG | − | GCAUUUGUCUGUAGACAGCC | 3539 |
| GTTGCCCAGGGGCTGGGGGA | 446 | GGG | − | GUUGCCCAGGGGCUGGGGGA | 3540 |
| AGATGCTTCTGGAACTCAAG | 447 | GGG | − | AGAUGCUUCUGGAACUCAAG | 3541 |
| GCTGGATTCTGACTACACTG | 448 | GGG | − | GCUGGAUUCUGACUACACUG | 3542 |
| AAAAAAAAAGTCATTGTTCT | 449 | TGG | + | AAAAAAAAAGUCAUUGUUCU | 3543 |
| AGGCCTGGGGGTGGAGCCCG | 450 | AGG | − | AGGCCUGGGGGUGGAGCCCG | 3544 |
| ATTAATGTAGCAAAGTGGAC | 451 | AGG | − | AUUAAUGUAGCAAAGUGGAC | 3545 |
| GCCCTGCAACGTGGGCCAGT | 452 | GGG | + | GCCCUGCAACGUGGGCCAGU | 3546 |
| TTCTCTTACACCGCACATAT | 453 | TGG | + | UUCUCUUACACCGCACAUAU | 3547 |
| AAAAATAGGTTTAAAAATAT | 454 | TGG | + | AAAAAUAGGUUUAAAAAUAU | 3548 |
| CACAACAACTTCGGCCTCCT | 455 | GGG | − | CACAACAACUUCGGCCUCCU | 3549 |
| GCAAGGTTTTATTGAGTGGA | 456 | AGG | − | GCAAGGUUUUAUUGAGUGGA | 3550 |
| TATCTCAGGGTTCTTGCCTT | 457 | GGG | − | UAUCUCAGGGUUCUUGCCUU | 3551 |
| ATGTCTGGGAAGGCCGGGTG | 458 | TGG | + | AUGUCUGGGAAGGCCGGGUG | 3552 |
| TGCATCTTTCCCATGTCTAT | 459 | GGG | − | UGCAUCUUUCCCAUGUCUAU | 3553 |
| TGTGAAAGTGTTACTATTTT | 460 | AGG | − | UGUGAAAGUGUUACUAUUUU | 3554 |
| AAGAAAGAGAATAGATAGTA | 461 | TGG | − | AAGAAAGAGAAUAGAUAGUA | 3555 |
| CTAGCCTATGAGCTTTATGA | 462 | TGG | + | CUAGCCUAUGAGCUUUAUGA | 3556 |
| TCCACGCTGCTGAGGCAGTG | 463 | AGG | − | UCCACGCUGCUGAGGCAGUG | 3557 |
| TTTCTATGGCCAGCTTCAGG | 464 | AGG | + | UUUCUAUGGCCAGCUUCAGG | 3558 |
| GGGAAGGAACGCTCTATGGT | 465 | TGG | + | GGGAAGGAACGCUCUAUGGU | 3559 |
| GGGCAGATTACGCGTGGCAG | 466 | GGG | − | GGGCAGAUUACGCGUGGCAG | 3560 |
| CTTGCCATCATAAAGCTCAT | 467 | AGG | − | CUUGCCAUCAUAAAGCUCAU | 3561 |
| GAGTTTTGATAGGCACAGGA | 468 | TGG | − | GAGUUUUGAUAGGCACAGGA | 3562 |
| GCAAGAAATGGGTCCAAAAT | 469 | TGG | + | GCAAGAAAUGGGUCCAAAAU | 3563 |
| GGATGGGACAGAGCATCTCC | 470 | TGG | + | GGAUGGGACAGAGCAUCUCC | 3564 |
| GTTCCGCCGGTTGATGGCCT | 471 | GGG | − | GUUCCGCCGGUUGAUGGCCU | 3565 |
| TTTTTACACTCAGGTTTAGT | 472 | CGG | + | UUUUUACACUCAGGUUUAGU | 3566 |
| TGCCCTGCAACGTGGGCCAG | 473 | TGG | + | UGCCCUGCAACGUGGGCCAG | 3567 |
| TGGGCCAGTGGGAAGGTTTG | 474 | GGG | + | UGGGCCAGUGGGAAGGUUUG | 3568 |
| GACAAATGCTTTCTGCGGGA | 475 | GGG | + | GACAAAUGCUUUCUGCGGGA | 3569 |
| CAGATTACGCGTGGCAGGGG | 476 | TGG | − | CAGAUUACGCGUGGCAGGGG | 3570 |
| GCCCTGCAGGAACTGGCTCC | 477 | CGG | + | GCCCUGCAGGAACUGGCUCC | 3571 |
| TCTTTAGCAGGTAGAGTACC | 478 | TGG | + | UCUUUAGCAGGUAGAGUACC | 3572 |
| CACCTACCAAGCCCGACTCC | 479 | AGG | + | CACCUACCAAGCCCGACUCC | 3573 |
| CTCCTGGAGTCGGGCTTGGT | 480 | AGG | − | CUCCUGGAGUCGGGCUUGGU | 3574 |
| GATGCTTTTCTCCTGGAGTC | 481 | GGG | − | GAUGCUUUUCUCCUGGAGUC | 3575 |
| ACTGACCTTCCTAGGTTTGA | 482 | TGG | + | ACUGACCUUCCUAGGUUUGA | 3576 |
| GCAGGCCATCAAACCTAGGA | 483 | AGG | − | GCAGGCCAUCAAACCUAGGA | 3577 |
| CTCATCCCTGACTATCTGCT | 484 | AGG | + | CUCAUCCCUGACUAUCUGCU | 3578 |
| GTGGGCCAGTGGGAAGGTTT | 485 | GGG | + | GUGGGCCAGUGGGAAGGUUU | 3579 |
| AGAATCGATTGAACCCAGGC | 486 | GGG | − | AGAAUCGAUUGAACCCAGGC | 3580 |
| ACGTCCTCTTTATAGGGAAT | 487 | GGG | + | ACGUCCUCUUUAUAGGGAAU | 3581 |
| CTATTTGGCAATTTATACAA | 488 | AGG | − | CUAUUUGGCAAUUUAUACAA | 3582 |
| CAAAAATCAGCTGGGCTTTG | 489 | TGG | − | CAAAAAUCAGCUGGGCUUUG | 3583 |
| GGCTGTGAGGCAGTTTCTGA | 490 | AGG | − | GGCUGUGAGGCAGUUUCUGA | 3584 |
| CGTACAAAAGGGGCCGGGCG | 491 | CGG | − | CGUACAAAAGGGGCCGGGCG | 3585 |
| CTTCTTATTTTCAAATCCAA | 492 | TGG | − | CUUCUUAUUUUCAAAUCCAA | 3586 |
| CGTTCCGCCGGTTGATGGCC | 493 | TGG | − | CGUUCCGCCGGUUGAUGGCC | 3587 |
| ACTACTACCACATTGGTGAC | 494 | TGG | + | ACUACUACCACAUUGGUGAC | 3588 |
| CACAAGGGGCTTGAGGACCC | 495 | AGG | − | CACAAGGGGCUUGAGGACCC | 3589 |
| TTATAGGGAATGGGCTGAGC | 496 | AGG | + | UUAUAGGGAAUGGGCUGAGC | 3590 |
| CTTTAGCAGGTAGAGTACCT | 497 | GGG | + | CUUUAGCAGGUAGAGUACCU | 3591 |
| CCTAGACACTGCCGTGGGTT | 498 | TGG | + | CCUAGACACUGCCGUGGGUU | 3592 |
| GCTGTGGGGCTCCAAACCCA | 499 | CGG | − | GCUGUGGGGCUCCAAACCCA | 3593 |
| CATAGCGGGTGAGTAACCAG | 500 | TGG | + | CAUAGCGGGUGAGUAACCAG | 3594 |
| CTCTTAGCCTAGGAAGATTC | 501 | AGG | − | CUCUUAGCCUAGGAAGAUUC | 3595 |
| TAAAGAAATTGCCTTCACTT | 502 | AGG | + | UAAAGAAAUUGCCUUCACUU | 3596 |
| TTCATCCAACGCCTAAGTGA | 503 | AGG | − | UUCAUCCAACGCCUAAGUGA | 3597 |
| TGGCTGGATTCTGACTACAC | 504 | TGG | − | UGGCUGGAUUCUGACUACAC | 3598 |
| CTACTACCACATTGGTGACT | 505 | GGG | + | CUACUACCACAUUGGUGACU | 3599 |
| TACTTCGATGGGCTATGCAG | 506 | GGG | − | UACUUCGAUGGGCUAUGCAG | 3600 |
| TGTCCAGGTGCCATATTTGA | 507 | TGG | + | UGUCCAGGUGCCAUAUUUGA | 3601 |
| TGCATAAGGCCCATAGACAT | 508 | GGG | + | UGCAUAAGGCCCAUAGACAU | 3602 |
| GCCCAGGGGCTGGGGGAGGG | 509 | GGG | − | GCCCAGGGGCUGGGGGAGGG | 3603 |
| ACCTTGCAACCCATGAGGAA | 510 | AGG | − | ACCUUGCAACCCAUGAGGAA | 3604 |
| ATTACGCGTGGCAGGGGTGG | 511 | GGG | − | AUUACGCGUGGCAGGGGUGG | 3605 |
| TGTGTGTGTTGGGTGGGAGT | 512 | GGG | − | UGUGUGUGUUGGGUGGGAGU | 3606 |
| ATCATAATACATCTCAGAGG | 513 | TGG | + | AUCAUAAUACAUCUCAGAGG | 3607 |
| CTACCATCCTATGGCCACCA | 514 | GGG | − | CUACCAUCCUAUGGCCACCA | 3608 |
| AACCTCTTTGGAAAACTATT | 515 | TGG | − | AACCUCUUUGGAAAACUAUU | 3609 |
| CCCCTTGTGAGCAGAGAGTG | 516 | AGG | + | CCCCUUGUGAGCAGAGAGUG | 3610 |
| CATGAACCTTGAGATAAGTG | 517 | AGG | − | CAUGAACCUUGAGAUAAGUG | 3611 |
| CAGAAAAACTTCACACTGCT | 518 | AGG | + | CAGAAAAACUUCACACUGCU | 3612 |
| GGCCCATTTCAGGAGAGAAA | 519 | GGG | + | GGCCCAUUUCAGGAGAGAAA | 3613 |
| TTAAAGCACTGATGGGGTGC | 520 | AGG | − | UUAAAGCACUGAUGGGGUGC | 3614 |
| GCATATTCTGGAAAACTTTT | 521 | AGG | + | GCAUAUUCUGGAAAACUUUU | 3615 |
| CTGGAGCATCCCTCTGGCCC | 522 | AGG | − | CUGGAGCAUCCCUCUGGCCC | 3616 |
| CTCCCCCCTCCCCCAGCCCC | 523 | TGG | + | CUCCCCCCUCCCCCAGCCCC | 3617 |
| TCCCCCCTCCCCCAGCCCCT | 524 | GGG | + | UCCCCCCUCCCCCAGCCCCU | 3618 |
| TCCGTGGTTGCCCAGGGGCT | 525 | GGG | − | UCCGUGGUUGCCCAGGGGCU | 3619 |
| ATCCGTGGTTGCCCAGGGGC | 526 | TGG | − | AUCCGUGGUUGCCCAGGGGC | 3620 |
| CGACAAAAGACAGATTAATG | 527 | AGG | + | CGACAAAAGACAGAUUAAUG | 3621 |
| AAGATTAGACTGACCTTCCT | 528 | AGG | + | AAGAUUAGACUGACCUUCCU | 3622 |
| CTTGCTGAGGAAAGAGGAGG | 529 | GGG | − | CUUGCUGAGGAAAGAGGAGG | 3623 |
| GCAGAGAGAGAAGGAACGAC | 530 | AGG | − | GCAGAGAGAGAAGGAACGAC | 3624 |
| CTCTGCTCACAAGGGGCTTG | 531 | AGG | − | CUCUGCUCACAAGGGGCUUG | 3625 |
| GACAAAAGACAGATTAATGA | 532 | GGG | + | GACAAAAGACAGAUUAAUGA | 3626 |
| AAGTATGCAATGAATGTCAA | 533 | TGG | − | AAGUAUGCAAUGAAUGUCAA | 3627 |
| CCCCAGCCCCTGGGCAACCA | 534 | CGG | + | CCCCAGCCCCUGGGCAACCA | 3628 |
| GTGTTACTATTTTAGGCGAC | 535 | AGG | − | GUGUUACUAUUUUAGGCGAC | 3629 |
| AAAGCAGAGCATCTACATCG | 536 | GGG | − | AAAGCAGAGCAUCUACAUCG | 3630 |
| GGGTCTTACTCTTGTCGCCC | 537 | AGG | − | GGGUCUUACUCUUGUCGCCC | 3631 |
| TAAAACTTATTAAATAAGTA | 538 | TGG | − | UAAAACUUAUUAAAUAAGUA | 3632 |
| ATCTGTGGGCAAGAAAAAGG | 539 | TGG | + | AUCUGUGGGCAAGAAAAAGG | 3633 |
| GAGTACCTGGGAGAGAGGGT | 540 | GGG | + | GAGUACCUGGGAGAGAGGGU | 3634 |
| CCTCACTCTCTGCTCACAAG | 541 | GGG | − | CCUCACUCUCUGCUCACAAG | 3635 |
| AGCTGGGAACCTGAAGACAA | 542 | AGG | + | AGCUGGGAACCUGAAGACAA | 3636 |
| GCGGGCAGATTACGCGTGGC | 543 | AGG | − | GCGGGCAGAUUACGCGUGGC | 3637 |
| AACACAAGGAAGTAGGGAAC | 544 | AGG | − | AACACAAGGAAGUAGGGAAC | 3638 |
| CTCACCAGACCCAAATCTGC | 545 | TGG | − | CUCACCAGACCCAAAUCUGC | 3639 |
| GAAGGGAGATGCTTTTCTCC | 546 | TGG | − | GAAGGGAGAUGCUUUUCUCC | 3640 |
| AAATGGAGTTTTGGTGGTGT | 547 | AGG | + | AAAUGGAGUUUUGGUGGUGU | 3641 |
| TGAAGCAGGCCATCAAACCT | 548 | AGG | − | UGAAGCAGGCCAUCAAACCU | 3642 |
| AGGTTTGATGGCCTGCTTCA | 549 | GGG | + | AGGUUUGAUGGCCUGCUUCA | 3643 |
| CACCTCTTCTTCCCTGAAGC | 550 | AGG | − | CACCUCUUCUUCCCUGAAGC | 3644 |
| ACAGTGCCAGATCCTCTTTT | 551 | TGG | − | ACAGUGCCAGAUCCUCUUUU | 3645 |
| CTGTTCATCAAGAGATGCAA | 552 | AGG | − | CUGUUCAUCAAGAGAUGCAA | 3646 |
| GGCTGGGGGAGGGGGGAGAC | 553 | AGG | − | GGCUGGGGGAGGGGGGAGAC | 3647 |
| ATAATCTGTGGGCAAGAAAA | 554 | AGG | + | AUAAUCUGUGGGCAAGAAAA | 3648 |
| TTATTATTATATGCATCATA | 555 | GGG | + | UUAUUAUUAUAUGCAUCAUA | 3649 |
| TAAACCTATTTTTATAGAGA | 556 | TGG | − | UAAACCUAUUUUUAUAGAGA | 3650 |
| ATCTGCTGGCACCTTGATCG | 557 | TGG | − | AUCUGCUGGCACCUUGAUCG | 3651 |
| TTGTTTCTATGGCCAGCTTC | 558 | AGG | + | UUGUUUCUAUGGCCAGCUUC | 3652 |
| GAGGTGAGTGCAGTCATCCG | 559 | AGG | − | GAGGUGAGUGCAGUCAUCCG | 3653 |
| AAAAGCAGAGCATCTACATC | 560 | GGG | − | AAAAGCAGAGCAUCUACAUC | 3654 |
| CAAGCTAGTGATACTGGAGG | 561 | GGG | + | CAAGCUAGUGAUACUGGAGG | 3655 |
| AGGATAGAGCTGCCATTTGC | 562 | GGG | − | AGGAUAGAGCUGCCAUUUGC | 3656 |
| AGATTACGCGTGGCAGGGGT | 563 | GGG | − | AGAUUACGCGUGGCAGGGGU | 3657 |
| AGGTGAGTGCAGTCATCCGA | 564 | GGG | − | AGGUGAGUGCAGUCAUCCGA | 3658 |
| CCTAGAGTGGTGGAAGCTAA | 565 | AGG | + | CCUAGAGUGGUGGAAGCUAA | 3659 |
| CGATAGACGCCGGCAGCCCC | 566 | AGG | + | CGAUAGACGCCGGCAGCCCC | 3660 |
| CCCCGCTGCTCAAACCTCTG | 567 | GGG | − | CCCCGCUGCUCAAACCUCUG | 3661 |
| ACTTTTCCTCACTTATCTCA | 568 | AGG | + | ACUUUUCCUCACUUAUCUCA | 3662 |
| AATCAGCTGGGCTTTGTGGC | 569 | AGG | − | AAUCAGCUGGGCUUUGUGGC | 3663 |
| GCCAGTCCCAGCTTCTCTTG | 570 | AGG | + | GCCAGUCCCAGCUUCUCUUG | 3664 |
| AGGGGGGAGACAGGGAGAAT | 571 | GGG | − | AGGGGGGAGACAGGGAGAAU | 3665 |
| GTGTGTGTGTTGGGTGGGAG | 572 | TGG | − | GUGUGUGUGUUGGGUGGGAG | 3666 |
| GGGAGGATCATGAGAGTTGG | 573 | AGG | − | GGGAGGAUCAUGAGAGUUGG | 3667 |
| AAGTGTCCTTCAAGGGGTCA | 574 | TGG | − | AAGUGUCCUUCAAGGGGUCA | 3668 |
| TACCATCCTATGGCCACCAG | 575 | GGG | − | UACCAUCCUAUGGCCACCAG | 3669 |
| CCTACCATCCTATGGCCACC | 576 | AGG | − | CCUACCAUCCUAUGGCCACC | 3670 |
| CCAGCTACCATGGGAGGCTG | 577 | AGG | + | CCAGCUACCAUGGGAGGCUG | 3671 |
| CTGATTCTTCCGATACCCCA | 578 | AGG | + | CUGAUUCUUCCGAUACCCCA | 3672 |
| CGTGGTTGCCCAGGGGCTGG | 579 | GGG | − | CGUGGUUGCCCAGGGGCUGG | 3673 |
| GAGGATAGAGCTGCCATTTG | 580 | CGG | − | GAGGAUAGAGCUGCCAUUUG | 3674 |
| AGTCTGAGGCTGGGGCAACT | 581 | GGG | − | AGUCUGAGGCUGGGGCAACU | 3675 |
| AGATGCTTTTCTCCTGGAGT | 582 | CGG | − | AGAUGCUUUUCUCCUGGAGU | 3676 |
| CCCATGGTGAGTACTTCGAT | 583 | GGG | − | CCCAUGGUGAGUACUUCGAU | 3677 |
| CAACAATTAATGAGAAAGTA | 584 | TGG | + | CAACAAUUAAUGAGAAAGUA | 3678 |
| CAATTTGCCCTGGATGGTCC | 585 | TGG | − | CAAUUUGCCCUGGAUGGUCC | 3679 |
| CGTAACATACCCAGTACCAC | 586 | TGG | + | CGUAACAUACCCAGUACCAC | 3680 |
| TCTTGCTGAGGAAAGAGGAG | 587 | GGG | − | UCUUGCUGAGGAAAGAGGAG | 3681 |
| GGTCCACAACATTGTACCAG | 588 | AGG | + | GGUCCACAACAUUGUACCAG | 3682 |
| TCATAATACATCTCAGAGGT | 589 | GGG | + | UCAUAAUACAUCUCAGAGGU | 3683 |
| AGGGATGAGCTCTTAAAAGA | 590 | AGG | − | AGGGAUGAGCUCUUAAAAGA | 3684 |
| CCCAGGGTAGGGCACACAGT | 591 | AGG | − | CCCAGGGUAGGGCACACAGU | 3685 |
| TACAGACAAATGCTTTCTGC | 592 | GGG | + | UACAGACAAAUGCUUUCUGC | 3686 |
| TAAAGCGCGCCTTTCCTCAT | 593 | GGG | + | UAAAGCGCGCCUUUCCUCAU | 3687 |
| AGTGGCCCTTTTGGACCAAG | 594 | GGG | + | AGUGGCCCUUUUGGACCAAG | 3688 |
| CCTCACTGAGAAGGTGATGT | 595 | TGG | − | CCUCACUGAGAAGGUGAUGU | 3689 |
| GGAGAAAACACAAGGAAGTA | 596 | GGG | − | GGAGAAAACACAAGGAAGUA | 3690 |
| AAGCTAGTGATACTGGAGGG | 597 | GGG | + | AAGCUAGUGAUACUGGAGGG | 3691 |
| CGTTGAGAGGAGTGCGCCGG | 598 | CGG | + | CGUUGAGAGGAGUGCGCCGG | 3692 |
| TCTGGGAAATGGAGTTTTGG | 599 | TGG | + | UCUGGGAAAUGGAGUUUUGG | 3693 |
| TTGCCCAGGGGCTGGGGGAG | 600 | GGG | − | UUGCCCAGGGGCUGGGGGAG | 3694 |
| GGGGCGAATGTTTACAGCTG | 601 | AGG | − | GGGGCGAAUGUUUACAGCUG | 3695 |
| TCAAAATGTCTGGGAAGGCC | 602 | GGG | + | UCAAAAUGUCUGGGAAGGCC | 3696 |
| TGGCCCATTTCAGGAGAGAA | 603 | AGG | + | UGGCCCAUUUCAGGAGAGAA | 3697 |
| TTCTCAGTATTTGGAAAGAC | 604 | TGG | + | UUCUCAGUAUUUGGAAAGAC | 3698 |
| GGGTGGGGAGGTCACAGAAC | 605 | AGG | − | GGGUGGGGAGGUCACAGAAC | 3699 |
| TTCTGGACAGTTCATTTCAA | 606 | TGG | + | UUCUGGACAGUUCAUUUCAA | 3700 |
| AGAAAGAAGGAAATTGCTTC | 607 | TGG | − | AGAAAGAAGGAAAUUGCUUC | 3701 |
| GCAAGGTGGTCTAACCTCTT | 608 | TGG | − | GCAAGGUGGUCUAACCUCUU | 3702 |
| TTCCGCCGGTTGATGGCCTG | 609 | GGG | − | UUCCGCCGGUUGAUGGCCUG | 3703 |
| GCCCATGGTGAGTACTTCGA | 610 | TGG | − | GCCCAUGGUGAGUACUUCGA | 3704 |
| GGGGCAAACATTGTGTATGA | 611 | CGG | + | GGGGCAAACAUUGUGUAUGA | 3705 |
| TAAGTATATTTACAGATTTG | 612 | TGG | + | UAAGUAUAUUUACAGAUUUG | 3706 |
| CCGTGGTTGCCCAGGGGCTG | 613 | GGG | − | CCGUGGUUGCCCAGGGGCUG | 3707 |
| AATCTGCCCGCAGATCCTGT | 614 | GGG | + | AAUCUGCCCGCAGAUCCUGU | 3708 |
| ACACAAGGAAGTAGGGAACA | 615 | GGG | − | ACACAAGGAAGUAGGGAACA | 3709 |
| GCCAGGCTGTCGGAGAAGAG | 616 | TGG | + | GCCAGGCUGUCGGAGAAGAG | 3710 |
| TTAATGTAGCAAAGTGGACA | 617 | GGG | − | UUAAUGUAGCAAAGUGGACA | 3711 |
| TGCAACGTGGGCCAGTGGGA | 618 | AGG | + | UGCAACGUGGGCCAGUGGGA | 3712 |
| AGCTCCCCAAACCTTCCCAC | 619 | TGG | − | AGCUCCCCAAACCUUCCCAC | 3713 |
| AGAGTGGCCCTTTTGGACCA | 620 | AGG | + | AGAGUGGCCCUUUUGGACCA | 3714 |
| ACTACATTAATGTAGCAAAG | 621 | TGG | − | ACUACAUUAAUGUAGCAAAG | 3715 |
| TGACTAGTCCCATGTGGTAT | 622 | TGG | − | UGACUAGUCCCAUGUGGUAU | 3716 |
| GATGCTATTAATAATTCTGT | 623 | TGG | + | GAUGCUAUUAAUAAUUCUGU | 3717 |
| CTGCCTCGGGCTCCACCCCC | 624 | AGG | + | CUGCCUCGGGCUCCACCCCC | 3718 |
| GGTTGATGGCCTGGGGCTGC | 625 | CGG | − | GGUUGAUGGCCUGGGGCUGC | 3719 |
| TAGTAAGATGTGGGGCCTTT | 626 | GGG | − | UAGUAAGAUGUGGGGCCUUU | 3720 |
| CAACTCCTGAATAGCACATT | 627 | GGG | + | CAACUCCUGAAUAGCACAUU | 3721 |
| CGTTAATCCATATTTAAACT | 628 | AGG | − | CGUUAAUCCAUAUUUAAACU | 3722 |
| GCTGGGGGAGGGGGGAGACA | 629 | GGG | − | GCUGGGGGAGGGGGGAGACA | 3723 |
| AGAAGGTTTCAGCGAAGACA | 630 | AGG | − | AGAAGGUUUCAGCGAAGACA | 3724 |
| GAAACGGAAGTCTGAGGCTG | 631 | GGG | − | GAAACGGAAGUCUGAGGCUG | 3725 |
| TCTACGGGAAGATATCCTGT | 632 | AGG | + | UCUACGGGAAGAUAUCCUGU | 3726 |
| GAAAAAAAAAAAAACAAGTC | 633 | TGG | + | GAAAAAAAAAAAAACAAGUC | 3727 |
| AGAAAAACTTCACACTGCTA | 634 | GGG | + | AGAAAAACUUCACACUGCUA | 3728 |
| TTCTTGCTGAGGAAAGAGGA | 635 | GGG | − | UUCUUGCUGAGGAAAGAGGA | 3729 |
| CAGGAATTGGCTCTGAAAGC | 636 | AGG | + | CAGGAAUUGGCUCUGAAAGC | 3730 |
| CAAAAGCAGAGCATCTACAT | 637 | CGG | − | CAAAAGCAGAGCAUCUACAU | 3731 |
| CCCGCTGCTCAAACCTCTGG | 638 | GGG | − | CCCGCUGCUCAAACCUCUGG | 3732 |
| CACACTTGCCGTGGCCAGCC | 639 | CGG | + | CACACUUGCCGUGGCCAGCC | 3733 |
| ACCTATTTTTATAGAGATGG | 640 | AGG | − | ACCUAUUUUUAUAGAGAUGG | 3734 |
| AGGAGGGAGGGGGCAGGAGC | 641 | AGG | + | AGGAGGGAGGGGGCAGGAGC | 3735 |
| GTCGATCCGTGGTTGCCCAG | 642 | GGG | − | GUCGAUCCGUGGUUGCCCAG | 3736 |
| CAAGTGGCTGGACGTGCAGA | 643 | AGG | + | CAAGUGGCUGGACGUGCAGA | 3737 |
| GGATTTCTCTTCTTTGTGAT | 644 | TGG | + | GGAUUUCUCUUCUUUGUGAU | 3738 |
| GCAATTAGGGTCTAGTTGGC | 645 | TGG | − | GCAAUUAGGGUCUAGUUGGC | 3739 |
| GGGGGGAGACAGGGAGAATG | 646 | GGG | − | GGGGGGAGACAGGGAGAAUG | 3740 |
| AGAGGGTGGGGCCTCAAAGC | 647 | AGG | + | AGAGGGUGGGGCCUCAAAGC | 3741 |
| CCATCCCACTGCCTGCTTTG | 648 | AGG | − | CCAUCCCACUGCCUGCUUUG | 3742 |
| AAGCAGGCAGTGGGATGGAG | 649 | AGG | + | AAGCAGGCAGUGGGAUGGAG | 3743 |
| CCCCAGAGGTTTGAGCAGCG | 650 | GGG | + | CCCCAGAGGUUUGAGCAGCG | 3744 |
| CAGGGCATGCAAGGGAGGTG | 651 | TGG | − | CAGGGCAUGCAAGGGAGGUG | 3745 |
| TTTTGTTCGTTATAGAATTT | 652 | TGG | − | UUUUGUUCGUUAUAGAAUUU | 3746 |
| AAATATGATTGGAGGATCAA | 653 | AGG | + | AAAUAUGAUUGGAGGAUCAA | 3747 |
| CTGCTGGTTTAAAGCACTGA | 654 | TGG | − | CUGCUGGUUUAAAGCACUGA | 3748 |
| GATTTTCTTGCTGAGGAAAG | 655 | AGG | − | GAUUUUCUUGCUGAGGAAAG | 3749 |
| CATTTGTCTGTAGACAGCCT | 656 | GGG | − | CAUUUGUCUGUAGACAGCCU | 3750 |
| ATCCGAGGGAGAGAAGATGC | 657 | TGG | − | AUCCGAGGGAGAGAAGAUGC | 3751 |
| CCAACATTGCGGTGTGAAGA | 658 | TGG | + | CCAACAUUGCGGUGUGAAGA | 3752 |
| GTAGTAAGATGTGGGGCCTT | 659 | TGG | − | GUAGUAAGAUGUGGGGCCUU | 3753 |
| TCAACTCCTGAATAGCACAT | 660 | TGG | + | UCAACUCCUGAAUAGCACAU | 3754 |
| AGAAAATAAATTAAAAAGCA | 661 | GGG | + | AGAAAAUAAAUUAAAAAGCA | 3755 |
| CCAAAGGCAAGGGGTGTTGG | 662 | TGG | − | CCAAAGGCAAGGGGUGUUGG | 3756 |
| TTGATGTTGACCTAACTGAC | 663 | AGG | + | UUGAUGUUGACCUAACUGAC | 3757 |
| CCTTCCGCCCGCCCCGCAAA | 664 | TGG | + | CCUUCCGCCCGCCCCGCAAA | 3758 |
| GCTGCCATTTGCGGGGCGGG | 665 | CGG | − | GCUGCCAUUUGCGGGGCGGG | 3759 |
| GGATAGAGCTGCCATTTGCG | 666 | GGG | − | GGAUAGAGCUGCCAUUUGCG | 3760 |
| AGCGAGGAACATCACACACT | 667 | GGG | + | AGCGAGGAACAUCACACACU | 3761 |
| AATATGATTGGAGGATCAAA | 668 | GGG | + | AAUAUGAUUGGAGGAUCAAA | 3762 |
| ATTGAACCCAGGCGGGCGGA | 669 | AGG | − | AUUGAACCCAGGCGGGCGGA | 3763 |
| AAGTCTGAGGCTGGGGCAAC | 670 | TGG | − | AAGUCUGAGGCUGGGGCAAC | 3764 |
| GATTACGCGTGGCAGGGGTG | 671 | GGG | − | GAUUACGCGUGGCAGGGGUG | 3765 |
| TAATCTGCCCGCAGATCCTG | 672 | TGG | + | UAAUCUGCCCGCAGAUCCUG | 3766 |
| ATAGATAGTATGGAAAATTA | 673 | CGG | − | AUAGAUAGUAUGGAAAAUUA | 3767 |
| TGGAGAGGAGAGAAAGCCCC | 674 | TGG | + | UGGAGAGGAGAGAAAGCCCC | 3768 |
| AGAGGAGAGAAAGCCCCTGG | 675 | TGG | + | AGAGGAGAGAAAGCCCCUGG | 3769 |
| GGGCTATGCAGGGGCTGCAG | 676 | TGG | − | GGGCUAUGCAGGGGCUGCAG | 3770 |
| CCAGGGCAAATTGGGGTGTA | 677 | AGG | + | CCAGGGCAAAUUGGGGUGUA | 3771 |
| CGTGGGCCAGTGGGAAGGTT | 678 | TGG | + | CGUGGGCCAGUGGGAAGGUU | 3772 |
| TTGGTGATTAAATCATTGTG | 679 | TGG | + | UUGGUGAUUAAAUCAUUGUG | 3773 |
| TGTCTCTTGCTAGCTCAAAG | 680 | TGG | − | UGUCUCUUGCUAGCUCAAAG | 3774 |
| GGGCAAGCTAGTGATACTGG | 681 | AGG | + | GGGCAAGCUAGUGAUACUGG | 3775 |
| CTTCAATTAGGAAAAAATAA | 682 | GGG | + | CUUCAAUUAGGAAAAAAUAA | 3776 |
| TAGAAAATAAATTAAAAAGC | 683 | AGG | + | UAGAAAAUAAAUUAAAAAGC | 3777 |
| ACCTACTGTGTGCCCTACCC | 684 | TGG | + | ACCUACUGUGUGCCCUACCC | 3778 |
| GAGTGGCCCTTTTGGACCAA | 685 | GGG | + | GAGUGGCCCUUUUGGACCAA | 3779 |
| ATAATAAAGTGTCCTTCAAG | 686 | GGG | − | AUAAUAAAGUGUCCUUCAAG | 3780 |
| CTCCACCGTCAATAGCATTC | 687 | CGG | − | CUCCACCGUCAAUAGCAUUC | 3781 |
| ATGTTGCTGGTGGGGGTGCA | 688 | AGG | − | AUGUUGCUGGUGGGGGUGCA | 3782 |
| GTACTTCGATGGGCTATGCA | 689 | GGG | − | GUACUUCGAUGGGCUAUGCA | 3783 |
| CCCCAGCCATGCACAAAGAT | 690 | TGG | − | CCCCAGCCAUGCACAAAGAU | 3784 |
| AGTACCTGGGAGAGAGGGTG | 691 | GGG | + | AGUACCUGGGAGAGAGGGUG | 3785 |
| GTTTTGATAGGCACAGGATG | 692 | GGG | − | GUUUUGAUAGGCACAGGAUG | 3786 |
| TCTGTAACACACGCCTGCTG | 693 | GGG | + | UCUGUAACACACGCCUGCUG | 3787 |
| AATAGCAAAGTGGTTAAAGG | 694 | AGG | + | AAUAGCAAAGUGGUUAAAGG | 3788 |
| TATCATCAGAAAAGAAAGAA | 695 | AGG | + | UAUCAUCAGAAAAGAAAGAA | 3789 |
| GAATTTAAATTAATTAAAAT | 696 | TGG | − | GAAUUUAAAUUAAUUAAAAU | 3790 |
| CATATATTAGCAGAAACTGA | 697 | TGG | − | CAUAUAUUAGCAGAAACUGA | 3791 |
| GGTGGGGAGGTCACAGAACA | 698 | GGG | − | GGUGGGGAGGUCACAGAACA | 3792 |
| ACAAATGCTTTCTGCGGGAG | 699 | GGG | + | ACAAAUGCUUUCUGCGGGAG | 3793 |
| AGGGCCTCGTGGGCCATGTG | 700 | AGG | − | AGGGCCUCGUGGGCCAUGUG | 3794 |
| CCTGCGCAAAACGCTTTGGC | 701 | GGG | − | CCUGCGCAAAACGCUUUGGC | 3795 |
| CCGCTCCCCCACCCCACGAC | 702 | AGG | − | CCGCUCCCCCACCCCACGAC | 3796 |
| TAAGTACCATATACATAATG | 703 | TGG | − | UAAGUACCAUAUACAUAAUG | 3797 |
| GTGTGTTGGGTGGGAGTGGG | 704 | TGG | − | GUGUGUUGGGUGGGAGUGGG | 3798 |
| AAGAAAAAGGTGGACTGAAA | 705 | AGG | + | AAGAAAAAGGUGGACUGAAA | 3799 |
| CGTTTTTTAATGGATCCATG | 706 | TGG | + | CGUUUUUUAAUGGAUCCAUG | 3800 |
| AATTTGCCCTGGATGGTCCT | 707 | GGG | − | AAUUUGCCCUGGAUGGUCCU | 3801 |
| GGCTGGATTCTGACTACACT | 708 | GGG | − | GGCUGGAUUCUGACUACACU | 3802 |
| CTCTCCTGCGCAAAACGCTT | 709 | TGG | − | CUCUCCUGCGCAAAACGCUU | 3803 |
| ATCTCGGCTCACAACAACTT | 710 | CGG | − | AUCUCGGCUCACAACAACUU | 3804 |
| TTTTGATAGGCACAGGATGG | 711 | GGG | − | UUUUGAUAGGCACAGGAUGG | 3805 |
| AAAGTGGACAGGGCAGGGAG | 712 | AGG | − | AAAGUGGACAGGGCAGGGAG | 3806 |
| AAGAGGTGAAAGGAATTCGA | 713 | TGG | + | AAGAGGUGAAAGGAAUUCGA | 3807 |
| AGACCAAAGGCAAGGGGTGT | 714 | TGG | − | AGACCAAAGGCAAGGGGUGU | 3808 |
| AAGGTTGCATTGGACACTGC | 715 | TGG | − | AAGGUUGCAUUGGACACUGC | 3809 |
| ACCACACTGCTGTCTCTCCT | 716 | GGG | − | ACCACACUGCUGUCUCUCCU | 3810 |
| AATTAATATCGTTGATAAAT | 717 | AGG | + | AAUUAAUAUCGUUGAUAAAU | 3811 |
| ATGCTATTAATAATTCTGTT | 718 | GGG | + | AUGCUAUUAAUAAUUCUGUU | 3812 |
| AGGGCACCATCCAGCCTGTC | 719 | TGG | + | AGGGCACCAUCCAGCCUGUC | 3813 |
| TCATAGGCTAGTGTGTGTGT | 720 | TGG | − | UCAUAGGCUAGUGUGUGUGU | 3814 |
| GAAGATGGAAGGTCAGTGTT | 721 | GGG | + | GAAGAUGGAAGGUCAGUGUU | 3815 |
| CTGGGGGTGGAGCCCGAGGC | 722 | AGG | − | CUGGGGGUGGAGCCCGAGGC | 3816 |
| TTCTGTCCCTGTGAGAAGGC | 723 | AGG | + | UUCUGUCCCUGUGAGAAGGC | 3817 |
| GTATGTCACTGAAGAGAGTC | 724 | TGG | − | GUAUGUCACUGAAGAGAGUC | 3818 |
| AGTCGATCCGTGGTTGCCCA | 725 | GGG | − | AGUCGAUCCGUGGUUGCCCA | 3819 |
| CGGCGGAACGAGGTGGAGTT | 726 | TGG | + | CGGCGGAACGAGGUGGAGUU | 3820 |
| TTGTTTAGAAATTATTTTAT | 727 | AGG | − | UUGUUUAGAAAUUAUUUUAU | 3821 |
| GAGGAGAAATTCTGAGCAGA | 728 | TGG | − | GAGGAGAAAUUCUGAGCAGA | 3822 |
| AAACATTGTGTATGACGGCG | 729 | GGG | + | AAACAUUGUGUAUGACGGCG | 3823 |
| TGGAGAAAACACAAGGAAGT | 730 | AGG | − | UGGAGAAAACACAAGGAAGU | 3824 |
| TGAAGATGGAAGGTCAGTGT | 731 | TGG | + | UGAAGAUGGAAGGUCAGUGU | 3825 |
| TTTAAAAATATTGGGTGTGG | 732 | TGG | + | UUUAAAAAUAUUGGGUGUGG | 3826 |
| TAGAAGGCTCCTCACAGAAC | 733 | TGG | − | UAGAAGGCUCCUCACAGAAC | 3827 |
| GGTGTAACCCAGGACCATCC | 734 | AGG | + | GGUGUAACCCAGGACCAUCC | 3828 |
| TTTCTTGCTGAGGAAAGAGG | 735 | AGG | − | UUUCUUGCUGAGGAAAGAGG | 3829 |
| TCTCTTCTTTGTGATTGGCA | 736 | TGG | + | UCUCUUCUUUGUGAUUGGCA | 3830 |
| AATCGTCTGATTGCTGGAGA | 737 | GGG | + | AAUCGUCUGAUUGCUGGAGA | 3831 |
| CATTGCGGTGTGAAGATGGA | 738 | AGG | + | CAUUGCGGUGUGAAGAUGGA | 3832 |
| TGTCGTGGGGTGGGGGAGCG | 739 | GGG | + | UGUCGUGGGGUGGGGGAGCG | 3833 |
| GCAAGCTAGTGATACTGGAG | 740 | GGG | + | GCAAGCUAGUGAUACUGGAG | 3834 |
| AGTTTTGATAGGCACAGGAT | 741 | GGG | − | AGUUUUGAUAGGCACAGGAU | 3835 |
| TCACCATGGGCATGGTCCAG | 742 | TGG | + | UCACCAUGGGCAUGGUCCAG | 3836 |
| GGGTACTTGAGAATTGAGAG | 743 | AGG | − | GGGUACUUGAGAAUUGAGAG | 3837 |
| TTTCACTATTTTTCCTTTAG | 744 | AGG | + | UUUCACUAUUUUUCCUUUAG | 3838 |
| GGAACAGGGACTGGTCCTTT | 745 | TGG | − | GGAACAGGGACUGGUCCUUU | 3839 |
| TGTGTTGGGTGGGAGTGGGT | 746 | GGG | − | UGUGUUGGGUGGGAGUGGGU | 3840 |
| ACAAGCGGCTAGATGTCGAG | 747 | AGG | + | ACAAGCGGCUAGAUGUCGAG | 3841 |
| GTGAGTAACCAGTGGAACAA | 748 | GGG | + | GUGAGUAACCAGUGGAACAA | 3842 |
| TTCATCCAGATGTTAGAAAT | 749 | TGG | + | UUCAUCCAGAUGUUAGAAAU | 3843 |
| CGTCTGATTGCTGGAGAGGG | 750 | AGG | + | CGUCUGAUUGCUGGAGAGGG | 3844 |
| GAGGGGGGAGACAGGGAGAA | 751 | TGG | − | GAGGGGGGAGACAGGGAGAA | 3845 |
| TCCTGCGCAAAACGCTTTGG | 752 | CGG | − | UCCUGCGCAAAACGCUUUGG | 3846 |
| AGTTTACCAATCTTTGTGCA | 753 | TGG | + | AGUUUACCAAUCUUUGUGCA | 3847 |
| GCATCCCTCTGGCCCAGGGT | 754 | AGG | − | GCAUCCCUCUGGCCCAGGGU | 3848 |
| GTGTTGGGTGGGAGTGGGTG | 755 | GGG | − | GUGUUGGGUGGGAGUGGGUG | 3849 |
| GAGGCCCCACCCTCTCTCCC | 756 | AGG | − | GAGGCCCCACCCUCUCUCCC | 3850 |
| TCTATCGTGCGCTCTTCCGC | 757 | CGG | − | UCUAUCGUGCGCUCUUCCGC | 3851 |
| TCATTAATTGTTGCAACTTA | 758 | TGG | − | UCAUUAAUUGUUGCAACUUA | 3852 |
| CCAATCCAAGAGACTAAACT | 759 | AGG | + | CCAAUCCAAGAGACUAAACU | 3853 |
| GAACAGGGACTGGTCCTTTT | 760 | GGG | − | GAACAGGGACUGGUCCUUUU | 3854 |
| GAGACAAGTCTCTCTTTAGC | 761 | AGG | + | GAGACAAGUCUCUCUUUAGC | 3855 |
| GGTGAGTAACCAGTGGAACA | 762 | AGG | + | GGUGAGUAACCAGUGGAACA | 3856 |
| TGACCCTTTCTCTCCTGAAA | 763 | TGG | − | UGACCCUUUCUCUCCUGAAA | 3857 |
| TGAGAAAGTATGGCATATTC | 764 | TGG | + | UGAGAAAGUAUGGCAUAUUC | 3858 |
| ATTTGTCTGTAGACAGCCTG | 765 | GGG | − | AUUUGUCUGUAGACAGCCUG | 3859 |
| AAGGGGGAGCCCAGACAGGC | 766 | TGG | − | AAGGGGGAGCCCAGACAGGC | 3860 |
| CTGAGGCTGGGGCAACTGGG | 767 | AGG | − | CUGAGGCUGGGGCAACUGGG | 3861 |
| GACGGAGGCAAGAGACAGTC | 768 | TGG | + | GACGGAGGCAAGAGACAGUC | 3862 |
| AAGGGCTGTTTTTGTTTCTA | 769 | TGG | + | AAGGGCUGUUUUUGUUUCUA | 3863 |
| GAACAACAGTTGTCTTTGTG | 770 | TGG | + | GAACAACAGUUGUCUUUGUG | 3864 |
| AATCCAACAGAAAACAGGAT | 771 | GGG | + | AAUCCAACAGAAAACAGGAU | 3865 |
| CTGACTCAATTATAAGACAT | 772 | AGG | − | CUGACUCAAUUAUAAGACAU | 3866 |
| CCATGGGAAGGAACGCTCTA | 773 | TGG | + | CCAUGGGAAGGAACGCUCUA | 3867 |
| CGCAGGAGAGTGGCGGCATC | 774 | AGG | + | CGCAGGAGAGUGGCGGCAUC | 3868 |
| GGCAAGCTAGTGATACTGGA | 775 | GGG | + | GGCAAGCUAGUGAUACUGGA | 3869 |
| TTTAGTTTGCCGTCTGTAGG | 776 | CGG | − | UUUAGUUUGCCGUCUGUAGG | 3870 |
| ATGGAGTTTTGGTGGTGTAG | 777 | GGG | + | AUGGAGUUUUGGUGGUGUAG | 3871 |
| TGTAGCAAAGTGGACAGGGC | 778 | AGG | − | UGUAGCAAAGUGGACAGGGC | 3872 |
| AAATAATGATTATCTTTTTT | 779 | TGG | + | AAAUAAUGAUUAUCUUUUUU | 3873 |
| GACCCTTTCTCTCCTGAAAT | 780 | GGG | − | GACCCUUUCUCUCCUGAAAU | 3874 |
| GTGAAAGAAACGGAAGTCTG | 781 | AGG | − | GUGAAAGAAACGGAAGUCUG | 3875 |
| GGGTGGGGGTGTGAAAGAAA | 782 | CGG | − | GGGUGGGGGUGUGAAAGAAA | 3876 |
| GCATCATAGGGGTGTGGAAA | 783 | TGG | + | GCAUCAUAGGGGUGUGGAAA | 3877 |
| ATCTGTGTAAAAGAGACTCC | 784 | AGG | − | AUCUGUGUAAAAGAGACUCC | 3878 |
| GGCTATGCAGGGGCTGCAGT | 785 | GGG | − | GGCUAUGCAGGGGCUGCAGU | 3879 |
| AAGTCTGGGAAATGGAGTTT | 786 | TGG | + | AAGUCUGGGAAAUGGAGUUU | 3880 |
| GGAATTCGATGGCCCATTTC | 787 | AGG | + | GGAAUUCGAUGGCCCAUUUC | 3881 |
| TTATCTTACTTGCTTAACGC | 788 | AGG | + | UUAUCUUACUUGCUUAACGC | 3882 |
| GCTGTGAGGCAGTTTCTGAA | 789 | GGG | − | GCUGUGAGGCAGUUUCUGAA | 3883 |
| CGGATGTCTCATGTAACATG | 790 | TGG | + | CGGAUGUCUCAUGUAACAUG | 3884 |
| GGGCACCATCCAGCCTGTCT | 791 | GGG | + | GGGCACCAUCCAGCCUGUCU | 3885 |
| TTATATGCATCATAGGGGTG | 792 | TGG | + | UUAUAUGCAUCAUAGGGGUG | 3886 |
| CTACCATCAAATATGGCACC | 793 | TGG | − | CUACCAUCAAAUAUGGCACC | 3887 |
| TTATTGTATTTCTTGTAGAG | 794 | AGG | + | UUAUUGUAUUUCUUGUAGAG | 3888 |
| TGCCCCCTAGCAGATAGTCA | 795 | GGG | − | UGCCCCCUAGCAGAUAGUCA | 3889 |
| TTTCTGCGGGAGGGGAGTCT | 796 | GGG | + | UUUCUGCGGGAGGGGAGUCU | 3890 |
| TGGCGGGTCCCTGTTGCCAG | 797 | GGG | − | UGGCGGGUCCCUGUUGCCAG | 3891 |
| TTTGTTCAAAATGTCTGGGA | 798 | AGG | + | UUUGUUCAAAAUGUCUGGGA | 3892 |
| TGGCTGGGGGCTGCTAGTCC | 799 | AGG | − | UGGCUGGGGGCUGCUAGUCC | 3893 |
| CCAGCTCGATTTCAACACTG | 800 | GGG | + | CCAGCUCGAUUUCAACACUG | 3894 |
| CAAACTCCACCTCGTTCCGC | 801 | CGG | − | CAAACUCCACCUCGUUCCGC | 3895 |
| TCTGTGTAAAAGAGACTCCA | 802 | GGG | − | UCUGUGUAAAAGAGACUCCA | 3896 |
| GTGTAACCCAGGACCATCCA | 803 | GGG | + | GUGUAACCCAGGACCAUCCA | 3897 |
| TAAATTAAAAAGCAGGGAGA | 804 | AGG | + | UAAAUUAAAAAGCAGGGAGA | 3898 |
| GCTCTTAAAAGAAGGGACCA | 805 | AGG | − | GCUCUUAAAAGAAGGGACCA | 3899 |
| TGTGCCCTACCCTGGGCCAG | 806 | AGG | + | UGUGCCCUACCCUGGGCCAG | 3900 |
| ATTATAAGACATAGGAAGCC | 807 | AGG | − | AUUAUAAGACAUAGGAAGCC | 3901 |
| AATGAATTTGAGACGCCTAG | 808 | GGG | − | AAUGAAUUUGAGACGCCUAG | 3902 |
| AAACACTTGGAGACAGAGCG | 809 | AGG | + | AAACACUUGGAGACAGAGCG | 3903 |
| GTCTGCCCAATGTGCTATTC | 810 | AGG | − | GUCUGCCCAAUGUGCUAUUC | 3904 |
| TCATCCCTGACTATCTGCTA | 811 | GGG | + | UCAUCCCUGACUAUCUGCUA | 3905 |
| AGATAAGAAATAGAGAAAAG | 812 | AGG | + | AGAUAAGAAAUAGAGAAAAG | 3906 |
| AAGAAGTTGGCTGGGTGCAG | 813 | TGG | + | AAGAAGUUGGCUGGGUGCAG | 3907 |
| GCAAACATTGTGTATGACGG | 814 | CGG | + | GCAAACAUUGUGUAUGACGG | 3908 |
| GGCCCACGTTGCAGGGCACC | 815 | TGG | − | GGCCCACGUUGCAGGGCACC | 3909 |
| ACCTAGAGTCCAAGGAAGAG | 816 | AGG | − | ACCUAGAGUCCAAGGAAGAG | 3910 |
| GTCTAGAACTACATGCCACA | 817 | GGG | − | GUCUAGAACUACAUGCCACA | 3911 |
| TTTTCTCCTGGAGTCGGGCT | 818 | TGG | − | UUUUCUCCUGGAGUCGGGCU | 3912 |
| ATTCCTTCCCTCCGGGTATA | 819 | GGG | + | AUUCCUUCCCUCCGGGUAUA | 3913 |
| CAAACATTGTGTATGACGGC | 820 | GGG | + | CAAACAUUGUGUAUGACGGC | 3914 |
| CTTTCATAACCAAATCCACT | 821 | TGG | − | CUUUCAUAACCAAAUCCACU | 3915 |
| TGTCACAGCAGGAAATTTCA | 822 | AGG | − | UGUCACAGCAGGAAAUUUCA | 3916 |
| CCTCAGCTCACCATTTGCTC | 823 | TGG | − | CCUCAGCUCACCAUUUGCUC | 3917 |
| GGTGGGAGGATCATGAGAGT | 824 | TGG | − | GGUGGGAGGAUCAUGAGAGU | 3918 |
| GGACTCAGCCCCTGGCAACA | 825 | GGG | + | GGACUCAGCCCCUGGCAACA | 3919 |
| TGGGGCCTCAAAGCAGGCAG | 826 | TGG | + | UGGGGCCUCAAAGCAGGCAG | 3920 |
| CGTGGGGTGGGGGAGCGGGG | 827 | AGG | + | CGUGGGGUGGGGGAGCGGGG | 3921 |
| TTCTATGGCCAGCTTCAGGA | 828 | GGG | + | UUCUAUGGCCAGCUUCAGGA | 3922 |
| AGTAAGATATTTTAATACGA | 829 | TGG | − | AGUAAGAUAUUUUAAUACGA | 3923 |
| ACTGAAAAGGCCAGAGCAAA | 830 | TGG | + | ACUGAAAAGGCCAGAGCAAA | 3924 |
| CTGGTGGCCATAGGATGGTA | 831 | GGG | + | CUGGUGGCCAUAGGAUGGUA | 3925 |
| GAGAAAAGAGGCCAGGTGCA | 832 | GGG | + | GAGAAAAGAGGCCAGGUGCA | 3926 |
| TCTTTTAGTTTGCCGTCTGT | 833 | AGG | − | UCUUUUAGUUUGCCGUCUGU | 3927 |
| TGGTACTTATACTTTGATTG | 834 | TGG | + | UGGUACUUAUACUUUGAUUG | 3928 |
| CTTTCTGCGGGAGGGGAGTC | 835 | TGG | + | CUUUCUGCGGGAGGGGAGUC | 3929 |
| TAATGAATTTGAGACGCCTA | 836 | GGG | − | UAAUGAAUUUGAGACGCCUA | 3930 |
| TCACTGCCTCAGCAGCGTGG | 837 | AGG | + | UCACUGCCUCAGCAGCGUGG | 3931 |
| AAAAAAAGTGGTTGCAGAAC | 838 | AGG | + | AAAAAAAGUGGUUGCAGAAC | 3932 |
| TCTGGGAAGGCCGGGTGTGG | 839 | TGG | + | UCUGGGAAGGCCGGGUGUGG | 3933 |
| CCAGCCAAAAATAGCCAGTG | 840 | TGG | + | CCAGCCAAAAAUAGCCAGUG | 3934 |
| CCACACTGGCTATTTTTGGC | 841 | TGG | − | CCACACUGGCUAUUUUUGGC | 3935 |
| CAATTAGGGTCTAGTTGGCT | 842 | GGG | − | CAAUUAGGGUCUAGUUGGCU | 3936 |
| TGCCAGCTCGATTTCAACAC | 843 | TGG | + | UGCCAGCUCGAUUUCAACAC | 3937 |
| GAGCTAGCAAGAGACATCTA | 844 | CGG | + | GAGCUAGCAAGAGACAUCUA | 3938 |
| ACTTTTTTTGTGTCCACTGT | 845 | AGG | − | ACUUUUUUUGUGUCCACUGU | 3939 |
| TTAAATAGCAAAGTGGTTAA | 846 | AGG | + | UUAAAUAGCAAAGUGGUUAA | 3940 |
| TGAGGAAAGAGGAGGGGGCA | 847 | AGG | − | UGAGGAAAGAGGAGGGGGCA | 3941 |
| GGGGCCTCAAAGCAGGCAGT | 848 | GGG | + | GGGGCCUCAAAGCAGGCAGU | 3942 |
| ATAGCAAAGTGGTTAAAGGA | 849 | GGG | + | AUAGCAAAGUGGUUAAAGGA | 3943 |
| ATTGTATTTCTTGTAGAGAG | 850 | GGG | + | AUUGUAUUUCUUGUAGAGAG | 3944 |
| AGGGCTTCCCTAAGCCCAAA | 851 | AGG | + | AGGGCUUCCCUAAGCCCAAA | 3945 |
| CAGGCTGTCGGAGAAGAGTG | 852 | GGG | + | CAGGCUGUCGGAGAAGAGUG | 3946 |
| TTCAAAATGTCTGGGAAGGC | 853 | CGG | + | UUCAAAAUGUCUGGGAAGGC | 3947 |
| TGATGTTGACCTAACTGACA | 854 | GGG | + | UGAUGUUGACCUAACUGACA | 3948 |
| AATCTAAGATTGGTGACTGG | 855 | CGG | + | AAUCUAAGAUUGGUGACUGG | 3949 |
| CCATTTGCGGGGCGGGCGGA | 856 | AGG | − | CCAUUUGCGGGGCGGGCGGA | 3950 |
| AGTACTTCGATGGGCTATGC | 857 | AGG | − | AGUACUUCGAUGGGCUAUGC | 3951 |
| GGTTGTTAGACTCAGCACTG | 858 | TGG | − | GGUUGUUAGACUCAGCACUG | 3952 |
| CCTCTCGTGAAAGAGAAAGA | 859 | AGG | − | CCUCUCGUGAAAGAGAAAGA | 3953 |
| AGGTAGAGTACCTGGGAGAG | 860 | AGG | + | AGGUAGAGUACCUGGGAGAG | 3954 |
| AGCTAGCAAGAGACATCTAC | 861 | GGG | + | AGCUAGCAAGAGACAUCUAC | 3955 |
| GACAGCAGTGTGGTGGCTGC | 862 | AGG | + | GACAGCAGUGUGGUGGCUGC | 3956 |
| TGAGACAGGCCGATCACTTG | 863 | AGG | − | UGAGACAGGCCGAUCACUUG | 3957 |
| TGACTACTTTAAGATGCTTT | 864 | GGG | + | UGACUACUUUAAGAUGCUUU | 3958 |
| TTGCCCCCTAGCAGATAGTC | 865 | AGG | − | UUGCCCCCUAGCAGAUAGUC | 3959 |
| AACGTCCTCTTTATAGGGAA | 866 | TGG | + | AACGUCCUCUUUAUAGGGAA | 3960 |
| CTCAGTTTCCTTGTGTGTCC | 867 | AGG | + | CUCAGUUUCCUUGUGUGUCC | 3961 |
| TTCCTTTCAAGTGCTGTTAA | 868 | AGG | − | UUCCUUUCAAGUGCUGUUAA | 3962 |
| CAAAACTCCAAGACCCTAGC | 869 | AGG | + | CAAAACUCCAAGACCCUAGC | 3963 |
| CCAGGCTGTCGGAGAAGAGT | 870 | GGG | + | CCAGGCUGUCGGAGAAGAGU | 3964 |
| GGGTGGCCCTGAATCTTCCT | 871 | AGG | + | GGGUGGCCCUGAAUCUUCCU | 3965 |
| AGCCTCACTCTCTGCTCACA | 872 | AGG | − | AGCCUCACUCUCUGCUCACA | 3966 |
| TATTTCCATTTTTTACACTC | 873 | AGG | + | UAUUUCCAUUUUUUACACUC | 3967 |
| TTTTTGTTATTACTTCTCTT | 874 | TGG | + | UUUUUGUUAUUACUUCUCUU | 3968 |
| GATGGCTTTCCAGTTCTGTG | 875 | AGG | + | GAUGGCUUUCCAGUUCUGUG | 3969 |
| TTCTTCGCATCGCGGGGGTG | 876 | GGG | − | UUCUUCGCAUCGCGGGGGUG | 3970 |
| ACGATGTTCTCTGCTCTTCG | 877 | TGG | − | ACGAUGUUCUCUGCUCUUCG | 3971 |
| CTTCATCTGTTTCCATGGGA | 878 | AGG | + | CUUCAUCUGUUUCCAUGGGA | 3972 |
| TCAACACTGGGGTGTCCCCT | 879 | AGG | + | UCAACACUGGGGUGUCCCCU | 3973 |
| GGGTCTATGCTATGTTACCC | 880 | AGG | − | GGGUCUAUGCUAUGUUACCC | 3974 |
| AGAGTACCTGGGAGAGAGGG | 881 | TGG | + | AGAGUACCUGGGAGAGAGGG | 3975 |
| AGGAGCCTTCTAAAGTTCAA | 882 | AGG | + | AGGAGCCUUCUAAAGUUCAA | 3976 |
| GCTTCAATTAGGAAAAAATA | 883 | AGG | + | GCUUCAAUUAGGAAAAAAUA | 3977 |
| ATAAATCTAAGATTGGTGAC | 884 | TGG | + | AUAAAUCUAAGAUUGGUGAC | 3978 |
| ACTCAAGGGGGAGCCCAGAC | 885 | AGG | − | ACUCAAGGGGGAGCCCAGAC | 3979 |
| GTGGAACTTGAGGATAGACG | 886 | AGG | − | GUGGAACUUGAGGAUAGACG | 3980 |
| GTAGCAAAGTGGACAGGGCA | 887 | GGG | − | GUAGCAAAGUGGACAGGGCA | 3981 |
| AGGAGAAATTCTGAGCAGAT | 888 | GGG | − | AGGAGAAAUUCUGAGCAGAU | 3982 |
| AATAATAAAGTGTCCTTCAA | 889 | GGG | − | AAUAAUAAAGUGUCCUUCAA | 3983 |
| TTGGCGGGTCCCTGTTGCCA | 890 | GGG | − | UUGGCGGGUCCCUGUUGCCA | 3984 |
| AACAGTTGTCTTTGTGTGGA | 891 | TGG | + | AACAGUUGUCUUUGUGUGGA | 3985 |
| CTACAGACAAATGCTTTCTG | 892 | CGG | + | CUACAGACAAAUGCUUUCUG | 3986 |
| TGTAGGCTTGGCGCTATACT | 893 | AGG | − | UGUAGGCUUGGCGCUAUACU | 3987 |
| TTGTGGCACAGTGAGGGAAC | 894 | TGG | + | UUGUGGCACAGUGAGGGAAC | 3988 |
| CTTAAAGTAGTCAGAGTTAC | 895 | TGG | − | CUUAAAGUAGUCAGAGUUAC | 3989 |
| CTTGTAGTCCCAGCTACCAT | 896 | GGG | + | CUUGUAGUCCCAGCUACCAU | 3990 |
| GAGCGAGGAACATCACACAC | 897 | TGG | + | GAGCGAGGAACAUCACACAC | 3991 |
| CTCCAGGGAGCTAGTGAAAC | 898 | AGG | − | CUCCAGGGAGCUAGUGAAAC | 3992 |
| CTCCTGTTTCTCAAGCAGAT | 899 | TGG | + | CUCCUGUUUCUCAAGCAGAU | 3993 |
| GGCGCGCTTTAGATACACAC | 900 | AGG | − | GGCGCGCUUUAGAUACACAC | 3994 |
| CATAGGCTAGTGTGTGTGTT | 901 | GGG | − | CAUAGGCUAGUGUGUGUGUU | 3995 |
| TAGAACTACATGCCACAGGG | 902 | TGG | − | UAGAACUACAUGCCACAGGG | 3996 |
| CATCTCAGGGCATGCAAGGG | 903 | AGG | − | CAUCUCAGGGCAUGCAAGGG | 3997 |
| CGGAATGCTATTGACGGTGG | 904 | AGG | + | CGGAAUGCUAUUGACGGUGG | 3998 |
| TTCGCATCGCGGGGGTGGGG | 905 | AGG | − | UUCGCAUCGCGGGGGUGGGG | 3999 |
| ATCAGCAATTAGGGTCTAGT | 906 | TGG | − | AUCAGCAAUUAGGGUCUAGU | 4000 |
| ATTTGCGGGGCGGGCGGAAG | 907 | GGG | − | AUUUGCGGGGCGGGCGGAAG | 4001 |
| GGTGGAAGCTAAAGGAAGAT | 908 | GGG | + | GGUGGAAGCUAAAGGAAGAU | 4002 |
| ACTTCTTCGCATCGCGGGGG | 909 | TGG | − | ACUUCUUCGCAUCGCGGGGG | 4003 |
| CTCCTCATTACAGTGAAATA | 910 | AGG | + | CUCCUCAUUACAGUGAAAUA | 4004 |
| GGAGAAAAGCATCTCCCTTC | 911 | TGG | + | GGAGAAAAGCAUCUCCCUUC | 4005 |
| TGGTGATTAAATCATTGTGT | 912 | GGG | + | UGGUGAUUAAAUCAUUGUGU | 4006 |
| TTTTATAATTGTGATGATAA | 913 | AGG | + | UUUUAUAAUUGUGAUGAUAA | 4007 |
| ATTTAAATTCCAATACCACA | 914 | TGG | + | AUUUAAAUUCCAAUACCACA | 4008 |
| TGATTGTGTCCTCTGTCCCC | 915 | TGG | − | UGAUUGUGUCCUCUGUCCCC | 4009 |
| ATAATGAATTTGAGACGCCT | 916 | AGG | − | AUAAUGAAUUUGAGACGCCU | 4010 |
| TGAGAAACATAAATCCCGAG | 917 | AGG | + | UGAGAAACAUAAAUCCCGAG | 4011 |
| GTGCCCTACCCTGGGCCAGA | 918 | GGG | + | GUGCCCUACCCUGGGCCAGA | 4012 |
| TGAAATGAACTGTCCAGAAC | 919 | TGG | − | UGAAAUGAACUGUCCAGAAC | 4013 |
| CCATAGAGCGTTCCTTCCCA | 920 | TGG | − | CCAUAGAGCGUUCCUUCCCA | 4014 |
| ATGTCTCATGTAACATGTGG | 921 | TGG | + | AUGUCUCAUGUAACAUGUGG | 4015 |
| TATTATTATATGCATCATAG | 922 | GGG | + | UAUUAUUAUAUGCAUCAUAG | 4016 |
| AGAGAAAAGAGGCCAGGTGC | 923 | AGG | + | AGAGAAAAGAGGCCAGGUGC | 4017 |
| AGCAATGTTTACTGGGTGGG | 924 | TGG | + | AGCAAUGUUUACUGGGUGGG | 4018 |
| CAGTGTTGGGAAGAGTCCAT | 925 | TGG | + | CAGUGUUGGGAAGAGUCCAU | 4019 |
| TGGGACGACAGGTGTAACCC | 926 | AGG | + | UGGGACGACAGGUGUAACCC | 4020 |
| TTCAAAGATTGAGAGGGAAT | 927 | TGG | − | UUCAAAGAUUGAGAGGGAAU | 4021 |
| GGGCCAGAGGGATGCTCCAG | 928 | GGG | + | GGGCCAGAGGGAUGCUCCAG | 4022 |
| CATTTGCGGGGCGGGCGGAA | 929 | GGG | − | CAUUUGCGGGGCGGGCGGAA | 4023 |
| CACTGCTAGGGTTAAATGAA | 930 | AGG | + | CACUGCUAGGGUUAAAUGAA | 4024 |
| AATACACATAGAAAAATGAC | 931 | AGG | + | AAUACACAUAGAAAAAUGAC | 4025 |
| AGACCCATCCTGTTTTCTGT | 932 | TGG | − | AGACCCAUCCUGUUUUCUGU | 4026 |
| CTATGCTATGTTACCCAGGC | 933 | TGG | − | CUAUGCUAUGUUACCCAGGC | 4027 |
| TTGCTGGTGGGGGTGCAAGG | 934 | TGG | − | UUGCUGGUGGGGGUGCAAGG | 4028 |
| CACTGGTTACTCACCCGCTA | 935 | TGG | − | CACUGGUUACUCACCCGCUA | 4029 |
| CACCACACTGCTGTCTCTCC | 936 | TGG | − | CACCACACUGCUGUCUCUCC | 4030 |
| GGGACTAGTCATGACTACAT | 937 | TGG | + | GGGACUAGUCAUGACUACAU | 4031 |
| TTATTAGATTCCAGTGGTAC | 938 | TGG | − | UUAUUAGAUUCCAGUGGUAC | 4032 |
| CTACTTAGAAATATACCTTG | 939 | GGG | − | CUACUUAGAAAUAUACCUUG | 4033 |
| TCGAACAATAGACTTTCAAT | 940 | GGG | − | UCGAACAAUAGACUUUCAAU | 4034 |
| GACAGGGAGAATGGGGAGCG | 941 | AGG | − | GACAGGGAGAAUGGGGAGCG | 4035 |
| CCAACATCACCTTCTCAGTG | 942 | AGG | + | CCAACAUCACCUUCUCAGUG | 4036 |
| CCTCAAAGCAGGCAGTGGGA | 943 | TGG | + | CCUCAAAGCAGGCAGUGGGA | 4037 |
| ATCGGGGTATGTTTACACAA | 944 | TGG | − | AUCGGGGUAUGUUUACACAA | 4038 |
| TTTCGTACAATACTGGAGGC | 945 | TGG | + | UUUCGUACAAUACUGGAGGC | 4039 |
| TTCGCCCCTAGACACTGCCG | 946 | TGG | + | UUCGCCCCUAGACACUGCCG | 4040 |
| TGCCCTGAGATGGGGACAAG | 947 | GGG | + | UGCCCUGAGAUGGGGACAAG | 4041 |
| GGGAGCTAGTGAAACAGGAA | 948 | AGG | − | GGGAGCUAGUGAAACAGGAA | 4042 |
| AATCTTAAATCATCTAATTG | 949 | TGG | + | AAUCUUAAAUCAUCUAAUUG | 4043 |
| AAATCCAACAGAAAACAGGA | 950 | TGG | + | AAAUCCAACAGAAAACAGGA | 4044 |
| ATGTAAACCAGTTGTCTGTT | 951 | AGG | + | AUGUAAACCAGUUGUCUGUU | 4045 |
| ACCAAATCCACTTGGCTCAA | 952 | AGG | − | ACCAAAUCCACUUGGCUCAA | 4046 |
| ATCGAACAATAGACTTTCAA | 953 | TGG | − | AUCGAACAAUAGACUUUCAA | 4047 |
| AGGCTAGTGTGTGTGTTGGG | 954 | TGG | − | AGGCUAGUGUGUGUGUUGGG | 4048 |
| GGGACTCAGCCCCTGGCAAC | 955 | AGG | + | GGGACUCAGCCCCUGGCAAC | 4049 |
| TTTGGCGGGTCCCTGTTGCC | 956 | AGG | − | UUUGGCGGGUCCCUGUUGCC | 4050 |
| TTAGCTGAGCGTGGCAGCGC | 957 | AGG | + | UUAGCUGAGCGUGGCAGCGC | 4051 |
| AGTCTAGAACTACATGCCAC | 958 | AGG | − | AGUCUAGAACUACAUGCCAC | 4052 |
| TGTCGAGAGGAGCACATTGG | 959 | CGG | + | UGUCGAGAGGAGCACAUUGG | 4053 |
| TGTGGTAGTAGTAAGATGTG | 960 | GGG | − | UGUGGUAGUAGUAAGAUGUG | 4054 |
| ACTGCTAGGGTTAAATGAAA | 961 | GGG | + | ACUGCUAGGGUUAAAUGAAA | 4055 |
| AAAAAATCCTAACAGACAAC | 962 | TGG | − | AAAAAAUCCUAACAGACAAC | 4056 |
| TGTGGCACAGTGAGGGAACT | 963 | GGG | + | UGUGGCACAGUGAGGGAACU | 4057 |
| TAATTAAAATTGGCCGGGCG | 964 | GGG | − | UAAUUAAAAUUGGCCGGGCG | 4058 |
| CCAAACCGGAATGCTATTGA | 965 | CGG | + | CCAAACCGGAAUGCUAUUGA | 4059 |
| TCTATTTCTTATCTCCTGAG | 966 | TGG | − | UCUAUUUCUUAUCUCCUGAG | 4060 |
| TCTGTCCCTGTGAGAAGGCA | 967 | GGG | + | UCUGUCCCUGUGAGAAGGCA | 4061 |
| CTCGGCTTCATCTGTTTCCA | 968 | TGG | + | CUCGGCUUCAUCUGUUUCCA | 4062 |
| GAGAGTTGGAGGCTGCAGTG | 969 | AGG | − | GAGAGUUGGAGGCUGCAGUG | 4063 |
| TAAAAGAGAAACCTTGGGCC | 970 | GGG | + | UAAAAGAGAAACCUUGGGCC | 4064 |
| TATTCCTTCCCTCCGGGTAT | 971 | AGG | + | UAUUCCUUCCCUCCGGGUAU | 4065 |
| CCAAGGTATATTTCTAAGTA | 972 | GGG | + | CCAAGGUAUAUUUCUAAGUA | 4066 |
| CAAAAATAGCCAGTGTGGCT | 973 | TGG | + | CAAAAAUAGCCAGUGUGGCU | 4067 |
| ACAGGGAGAATGGGGAGCGA | 974 | GGG | − | ACAGGGAGAAUGGGGAGCGA | 4068 |
| AATATTGGGTGTGGTGGCAC | 975 | GGG | + | AAUAUUGGGUGUGGUGGCAC | 4069 |
| TTCCTGTTTCACTAGCTCCC | 976 | TGG | + | UUCCUGUUUCACUAGCUCCC | 4070 |
| AAGTACCATATACATAATGT | 977 | GGG | − | AAGUACCAUAUACAUAAUGU | 4071 |
| AAATTATGAATGATTAAAAA | 978 | TGG | − | AAAUUAUGAAUGAUUAAAAA | 4072 |
| TTCGTACAATACTGGAGGCT | 979 | GGG | + | UUCGUACAAUACUGGAGGCU | 4073 |
| ATAAAAGAGAAACCTTGGGC | 980 | CGG | + | AUAAAAGAGAAACCUUGGGC | 4074 |
| TGTTTTTTATTAGATTCCAG | 981 | TGG | − | UGUUUUUUAUUAGAUUCCAG | 4075 |
| CCTACTTAGAAATATACCTT | 982 | GGG | − | CCUACUUAGAAAUAUACCUU | 4076 |
| GCAGAGAACATCGTCTCTCC | 983 | AGG | + | GCAGAGAACAUCGUCUCUCC | 4077 |
| TGTCCCCTGGAGCATCCCTC | 984 | TGG | − | UGUCCCCUGGAGCAUCCCUC | 4078 |
| CTCTAAAGATTTGCCAGTTC | 985 | TGG | + | CUCUAAAGAUUUGCCAGUUC | 4079 |
| TTCTCAAGCAGATTGGAAGC | 986 | TGG | + | UUCUCAAGCAGAUUGGAAGC | 4080 |
| GGTAGAGTACCTGGGAGAGA | 987 | GGG | + | GGUAGAGUACCUGGGAGAGA | 4081 |
| CCAGGGATGAAGCAGGAAGC | 988 | AGG | − | CCAGGGAUGAAGCAGGAAGC | 4082 |
| CCAAACCCACGGCAGTGTCT | 989 | AGG | − | CCAAACCCACGGCAGUGUCU | 4083 |
| CAGGAGAGACAGCAGTGTGG | 990 | TGG | + | CAGGAGAGACAGCAGUGUGG | 4084 |
| GCCTCACTCTCTGCTCACAA | 991 | GGG | − | GCCUCACUCUCUGCUCACAA | 4085 |
| GAAAAATGACAGGAAATGAC | 992 | GGG | + | GAAAAAUGACAGGAAAUGAC | 4086 |
| CAAGCCACACTGGCTATTTT | 993 | TGG | − | CAAGCCACACUGGCUAUUUU | 4087 |
| TCGGATGACTGCACTCACCT | 994 | CGG | + | UCGGAUGACUGCACUCACCU | 4088 |
| AGTAGGTTGCCAAGCCACAC | 995 | TGG | − | AGUAGGUUGCCAAGCCACAC | 4089 |
| ACTCTCTTCAGTGACATACA | 996 | TGG | + | ACUCUCUUCAGUGACAUACA | 4090 |
| AAAAGGGCCACTCTGCTGTG | 997 | AGG | − | AAAAGGGCCACUCUGCUGUG | 4091 |
| ATGTTGGAGCAAAGATTCGA | 998 | AGG | − | AUGUUGGAGCAAAGAUUCGA | 4092 |
| CAACATCACCTTCTCAGTGA | 999 | GGG | + | CAACAUCACCUUCUCAGUGA | 4093 |
| TAATAATAAAGTGTCCTTCA | 1000 | AGG | − | UAAUAAUAAAGUGUCCUUCA | 4094 |
| AAAAAAGTGGTTGCAGAACA | 1001 | GGG | + | AAAAAAGUGGUUGCAGAACA | 4095 |
| AATGGAGTTTTGGTGGTGTA | 1002 | GGG | + | AAUGGAGUUUUGGUGGUGUA | 4096 |
| TTAAAGTAGTCAGAGTTACT | 1003 | GGG | − | UUAAAGUAGUCAGAGUUACU | 4097 |
| GGTCTAATTTTAAAATGCTT | 1004 | TGG | − | GGUCUAAUUUUAAAAUGCUU | 4098 |
| TAAATGAGAAAAGCATAACA | 1005 | AGG | + | UAAAUGAGAAAAGCAUAACA | 4099 |
| AATTAGGGTCTAGTTGGCTG | 1006 | GGG | − | AAUUAGGGUCUAGUUGGCUG | 4100 |
| GGGAGCGAGGGCTTAATGTT | 1007 | TGG | − | GGGAGCGAGGGCUUAAUGUU | 4101 |
| TGTCTTTCGCTTAGCATATG | 1008 | TGG | + | UGUCUUUCGCUUAGCAUAUG | 4102 |
| TTGGAGCAAAGATTCGAAGG | 1009 | AGG | − | UUGGAGCAAAGAUUCGAAGG | 4103 |
| TTAACACAATTAGCTGAGCG | 1010 | TGG | + | UUAACACAAUUAGCUGAGCG | 4104 |
| TTGTACGAAATAAATTTCTG | 1011 | TGG | − | UUGUACGAAAUAAAUUUCUG | 4105 |
| GAAAGCAGGCCTCTCTTCCT | 1012 | TGG | + | GAAAGCAGGCCUCUCUUCCU | 4106 |
| CATGAGATGCATCCACCCTG | 1013 | TGG | + | CAUGAGAUGCAUCCACCCUG | 4107 |
| TCAGCACTGTGGAAGAAACA | 1014 | AGG | − | UCAGCACUGUGGAAGAAACA | 4108 |
| CTTCTTCGCATCGCGGGGGT | 1015 | GGG | − | CUUCUUCGCAUCGCGGGGGU | 4109 |
| AACCAGTGGAACAAGGGCCC | 1016 | AGG | + | AACCAGUGGAACAAGGGCCC | 4110 |
| CTTCCCTCCGGGTATAGGGC | 1017 | AGG | + | CUUCCCUCCGGGUAUAGGGC | 4111 |
| ATCCCTGACTATCTGCTAGG | 1018 | GGG | + | AUCCCUGACUAUCUGCUAGG | 4112 |
| TCGGCTTCATCTGTTTCCAT | 1019 | GGG | + | UCGGCUUCAUCUGUUUCCAU | 4113 |
| AGGCAAAGAAATTCTATGGA | 1020 | CGG | + | AGGCAAAGAAAUUCUAUGGA | 4114 |
| CCTGGTGGCCATAGGATGGT | 1021 | AGG | + | CCUGGUGGCCAUAGGAUGGU | 4115 |
| CAGCGCGTGGTCCCTGCCTC | 1022 | GGG | + | CAGCGCGUGGUCCCUGCCUC | 4116 |
| TGGGGGTGGAGCCCGAGGCA | 1023 | GGG | − | UGGGGGUGGAGCCCGAGGCA | 4117 |
| GAGAAACCTTGGGCCGGGCA | 1024 | TGG | + | GAGAAACCUUGGGCCGGGCA | 4118 |
| CTGACTACTTTAAGATGCTT | 1025 | TGG | + | CUGACUACUUUAAGAUGCUU | 4119 |
| GATGGATGGCGAAGCCACTC | 1026 | AGG | + | GAUGGAUGGCGAAGCCACUC | 4120 |
| GCTTTGGTGGTAAAAAATAC | 1027 | AGG | + | GCUUUGGUGGUAAAAAAUAC | 4121 |
| CCCAAGGTATATTTCTAAGT | 1028 | AGG | + | CCCAAGGUAUAUUUCUAAGU | 4122 |
| GGCTAGTGTGTGTGTTGGGT | 1029 | GGG | − | GGCUAGUGUGUGUGUUGGGU | 4123 |
| CCTCAGCCTCCCATGGTAGC | 1030 | TGG | − | CCUCAGCCUCCCAUGGUAGC | 4124 |
| GCAGCGCGTGGTCCCTGCCT | 1031 | CGG | + | GCAGCGCGUGGUCCCUGCCU | 4125 |
| TATTAGATTCCAGTGGTACT | 1032 | GGG | − | UAUUAGAUUCCAGUGGUACU | 4126 |
| GAAAACCTAGTTTAGTCTCT | 1033 | TGG | − | GAAAACCUAGUUUAGUCUCU | 4127 |
| CTGGAGTCGGGCTTGGTAGG | 1034 | TGG | − | CUGGAGUCGGGCUUGGUAGG | 4128 |
| ATTAATTAAAATTGGCCGGG | 1035 | CGG | − | AUUAAUUAAAAUUGGCCGGG | 4129 |
| AGATTCATTCATTCATTCCT | 1036 | TGG | + | AGAUUCAUUCAUUCAUUCCU | 4130 |
| TTCACTTAGGCGTTGGATGA | 1037 | AGG | + | UUCACUUAGGCGUUGGAUGA | 4131 |
| TTTGAGGCAAAGAAATTCTA | 1038 | TGG | + | UUUGAGGCAAAGAAAUUCUA | 4132 |
| GAGACAGTCTGGCACATTTG | 1039 | TGG | + | GAGACAGUCUGGCACAUUUG | 4133 |
| CTCAGCCTCCCATGGTAGCT | 1040 | GGG | − | CUCAGCCUCCCAUGGUAGCU | 4134 |
| CTCCCTTGCATGCCCTGAGA | 1041 | TGG | + | CUCCCUUGCAUGCCCUGAGA | 4135 |
| TTAATTAAAATTGGCCGGGC | 1042 | GGG | − | UUAAUUAAAAUUGGCCGGGC | 4136 |
| TAGTCATGACTAGTCCCATG | 1043 | TGG | − | UAGUCAUGACUAGUCCCAUG | 4137 |
| TAGTCACATTTCTCAGTATT | 1044 | TGG | + | UAGUCACAUUUCUCAGUAUU | 4138 |
| TGAGGAGACACTGCCACTGA | 1045 | AGG | − | UGAGGAGACACUGCCACUGA | 4139 |
| CTGAGCAAACCTAGAGTCCA | 1046 | AGG | − | CUGAGCAAACCUAGAGUCCA | 4140 |
| AGCTTCAGGAGGGAGGGGGC | 1047 | AGG | + | AGCUUCAGGAGGGAGGGGGC | 4141 |
| AACGTTTCTATCATCGCAGA | 1048 | AGG | − | AACGUUUCUAUCAUCGCAGA | 4142 |
| TGTATGACGGCGGGGCGCGG | 1049 | TGG | + | UGUAUGACGGCGGGGCGCGG | 4143 |
| TGGGCCAGAGGGATGCTCCA | 1050 | GGG | + | UGGGCCAGAGGGAUGCUCCA | 4144 |
| ATTAGGGTCTAGTTGGCTGG | 1051 | GGG | − | AUUAGGGUCUAGUUGGCUGG | 4145 |
| AGAAAAATGACAGGAAATGA | 1052 | CGG | + | AGAAAAAUGACAGGAAAUGA | 4146 |
| GTGTGATATTCCTTCCCTCC | 1053 | GGG | + | GUGUGAUAUUCCUUCCCUCC | 4147 |
| TTGTGTATGACGGCGGGGCG | 1054 | CGG | + | UUGUGUAUGACGGCGGGGCG | 4148 |
| CCAATCTTTGTGCATGGCTG | 1055 | GGG | + | CCAAUCUUUGUGCAUGGCUG | 4149 |
| TGCAAAGGAAATCAGCAATT | 1056 | AGG | − | UGCAAAGGAAAUCAGCAAUU | 4150 |
| AGAAAGCCCCTGGTGGCCAT | 1057 | AGG | + | AGAAAGCCCCUGGUGGCCAU | 4151 |
| GCTATTAAAAAGGATGAGGT | 1058 | CGG | + | GCUAUUAAAAAGGAUGAGGU | 4152 |
| TATGGCCAGCTTCAGGAGGG | 1059 | AGG | + | UAUGGCCAGCUUCAGGAGGG | 4153 |
| TTATCAGTCATTTTTTGTAT | 1060 | GGG | + | UUAUCAGUCAUUUUUUGUAU | 4154 |
| CCATAGGATGGTAGGGATTT | 1061 | AGG | + | CCAUAGGAUGGUAGGGAUUU | 4155 |
| CCACTGAAGGACAGAAGCAG | 1062 | TGG | − | CCACUGAAGGACAGAAGCAG | 4156 |
| AGGGTTTCCTCACAGCAGAG | 1063 | TGG | + | AGGGUUUCCUCACAGCAGAG | 4157 |
| GCCAGCTCGATTTCAACACT | 1064 | GGG | + | GCCAGCUCGAUUUCAACACU | 4158 |
| AAGTTCCACAAAGCCTCACA | 1065 | TGG | + | AAGUUCCACAAAGCCUCACA | 4159 |
| ATTATCAGTCATTTTTTGTA | 1066 | TGG | + | AUUAUCAGUCAUUUUUUGUA | 4160 |
| CTATCTCCATGACCCCTTGA | 1067 | AGG | + | CUAUCUCCAUGACCCCUUGA | 4161 |
| GACTACTTTAAGATGCTTTG | 1068 | GGG | + | GACUACUUUAAGAUGCUUUG | 4162 |
| GACTGGTCCTTTTGGGCTTA | 1069 | GGG | − | GACUGGUCCUUUUGGGCUUA | 4163 |
| ATGTGGTAGTAGTAAGATGT | 1070 | GGG | − | AUGUGGUAGUAGUAAGAUGU | 4164 |
| TACATGGCCTTTGAGCCAAG | 1071 | TGG | + | UACAUGGCCUUUGAGCCAAG | 4165 |
| CATCAACCGGCGGAACGAGG | 1072 | TGG | + | CAUCAACCGGCGGAACGAGG | 4166 |
| GGACTGGTCCTTTTGGGCTT | 1073 | AGG | − | GGACUGGUCCUUUUGGGCUU | 4167 |
| TGGTGTATCTGCTTCAGCAT | 1074 | TGG | + | UGGUGUAUCUGCUUCAGCAU | 4168 |
| AAATATTGGGTGTGGTGGCA | 1075 | CGG | + | AAAUAUUGGGUGUGGUGGCA | 4169 |
| GAAACATAAATCCCGAGAGG | 1076 | TGG | + | GAAACAUAAAUCCCGAGAGG | 4170 |
| CTACCTCCTGCCCACCTCTC | 1077 | GGG | − | CUACCUCCUGCCCACCUCUC | 4171 |
| AGATGTCGAGAGGAGCACAT | 1078 | TGG | + | AGAUGUCGAGAGGAGCACAU | 4172 |
| CTCTGTAACACACGCCTGCT | 1079 | GGG | + | CUCUGUAACACACGCCUGCU | 4173 |
| CTGGGCCAGAGGGATGCTCC | 1080 | AGG | + | CUGGGCCAGAGGGAUGCUCC | 4174 |
| AAAATAGGTTTAAAAATATT | 1081 | GGG | + | AAAAUAGGUUUAAAAAUAUU | 4175 |
| AAACCTTGGGCCGGGCATGG | 1082 | TGG | + | AAACCUUGGGCCGGGCAUGG | 4176 |
| CAGAGCAAATGGTGAGCTGA | 1083 | GGG | + | CAGAGCAAAUGGUGAGCUGA | 4177 |
| ACCTTCATTGCTACTTGAGA | 1084 | AGG | + | ACCUUCAUUGCUACUUGAGA | 4178 |
| CTAGTTTAGTCTCTTGGATT | 1085 | GGG | − | CUAGUUUAGUCUCUUGGAUU | 4179 |
| AGTCTGGCACATTTGTGGCT | 1086 | TGG | + | AGUCUGGCACAUUUGUGGCU | 4180 |
| ACATATGAGCATTTCCAGTT | 1087 | TGG | + | ACAUAUGAGCAUUUCCAGUU | 4181 |
| CCCTACTTAGAAATATACCT | 1088 | TGG | − | CCCUACUUAGAAAUAUACCU | 4182 |
| ATATGGTACCTCAGAACCCC | 1089 | AGG | + | AUAUGGUACCUCAGAACCCC | 4183 |
| GAAACCCTTGTTGTCACAGC | 1090 | AGG | − | GAAACCCUUGUUGUCACAGC | 4184 |
| TGGTGGAAGCTAAAGGAAGA | 1091 | TGG | + | UGGUGGAAGCUAAAGGAAGA | 4185 |
| CATATGAGCATTTCCAGTTT | 1092 | GGG | + | CAUAUGAGCAUUUCCAGUUU | 4186 |
| TCGCCCCTAGACACTGCCGT | 1093 | GGG | + | UCGCCCCUAGACACUGCCGU | 4187 |
| CATCCCTGACTATCTGCTAG | 1094 | GGG | + | CAUCCCUGACUAUCUGCUAG | 4188 |
| GCAAAGGAAATCAGCAATTA | 1095 | GGG | − | GCAAAGGAAAUCAGCAAUUA | 4189 |
| CCAGAGCAAATGGTGAGCTG | 1096 | AGG | + | CCAGAGCAAAUGGUGAGCUG | 4190 |
| TTTGTTTTGTTCAAAATGTC | 1097 | TGG | + | UUUGUUUUGUUCAAAAUGUC | 4191 |
| GTGTCCTGCCCTATACCCGG | 1098 | AGG | − | GUGUCCUGCCCUAUACCCGG | 4192 |
| GTAGACAGCCTGGGGTTCTG | 1099 | AGG | − | GUAGACAGCCUGGGGUUCUG | 4193 |
| TAATTTTATGCTTTTCTTCT | 1100 | CGG | + | UAAUUUUAUGCUUUUCUUCU | 4194 |
| CCCCAGTGTTGAAATCGAGC | 1101 | TGG | − | CCCCAGUGUUGAAAUCGAGC | 4195 |
| TGGGGTTTGCAGAATGACCT | 1102 | TGG | − | UGGGGUUUGCAGAAUGACCU | 4196 |
| CCTAAATCCCTACCATCCTA | 1103 | TGG | − | CCUAAAUCCCUACCAUCCUA | 4197 |
| CAAACCCACGGCAGTGTCTA | 1104 | GGG | − | CAAACCCACGGCAGUGUCUA | 4198 |
| CAGTGGAAGTGTTAAGTGGC | 1105 | TGG | − | CAGUGGAAGUGUUAAGUGGC | 4199 |
| GTGATGATAAAGGCTTTGTG | 1106 | TGG | + | GUGAUGAUAAAGGCUUUGUG | 4200 |
| TATGGGTTTCTATAATCTGT | 1107 | GGG | + | UAUGGGUUUCUAUAAUCUGU | 4201 |
| ACTGCTGTGGAGAAAACACA | 1108 | AGG | − | ACUGCUGUGGAGAAAACACA | 4202 |
| CCCCATCTCAGGGCATGCAA | 1109 | GGG | − | CCCCAUCUCAGGGCAUGCAA | 4203 |
| AATGTGGTAGTAGTAAGATG | 1110 | TGG | − | AAUGUGGUAGUAGUAAGAUG | 4204 |
| TATTATTTCAAAGATTGAGA | 1111 | GGG | − | UAUUAUUUCAAAGAUUGAGA | 4205 |
| ATATTATTTCAAAGATTGAG | 1112 | AGG | − | AUAUUAUUUCAAAGAUUGAG | 4206 |
| AAACCCACGGCAGTGTCTAG | 1113 | GGG | − | AAACCCACGGCAGUGUCUAG | 4207 |
| AGGGATGCTCCAGGGGACAG | 1114 | AGG | + | AGGGAUGCUCCAGGGGACAG | 4208 |
| CAGAGGTGGGACTCAGCCCC | 1115 | TGG | + | CAGAGGUGGGACUCAGCCCC | 4209 |
| AGCAACATATGACACAGTTC | 1116 | AGG | + | AGCAACAUAUGACACAGUUC | 4210 |
| AGTGAGGCTTCCATTTCAGA | 1117 | AGG | + | AGUGAGGCUUCCAUUUCAGA | 4211 |
| TTCAGGGAAGAAGAGGTGAA | 1118 | AGG | + | UUCAGGGAAGAAGAGGUGAA | 4212 |
| TTTCAGGAGAGAAAGGGTCA | 1119 | AGG | + | UUUCAGGAGAGAAAGGGUCA | 4213 |
| TCCCCATCTCAGGGCATGCA | 1120 | AGG | − | UCCCCAUCUCAGGGCAUGCA | 4214 |
| AGCCCCTGGTGGCCATAGGA | 1121 | TGG | + | AGCCCCUGGUGGCCAUAGGA | 4215 |
| GAATCGTCTGATTGCTGGAG | 1122 | AGG | + | GAAUCGUCUGAUUGCUGGAG | 4216 |
| AAGACATAGGAAGCCAGGTG | 1123 | CGG | − | AAGACAUAGGAAGCCAGGUG | 4217 |
| GCCTCTCTTCCTTGGACTCT | 1124 | AGG | + | GCCUCUCUUCCUUGGACUCU | 4218 |
| GGAGCGAGGGCTTAATGTTT | 1125 | GGG | − | GGAGCGAGGGCUUAAUGUUU | 4219 |
| ACATTGCATAAATCTAAGAT | 1126 | TGG | + | ACAUUGCAUAAAUCUAAGAU | 4220 |
| GGGAGCCCAGACAGGCTGGA | 1127 | TGG | − | GGGAGCCCAGACAGGCUGGA | 4221 |
| AAACATAAATCCCGAGAGGT | 1128 | GGG | + | AAACAUAAAUCCCGAGAGGU | 4222 |
| TCTACCTCCTGCCCACCTCT | 1129 | CGG | − | UCUACCUCCUGCCCACCUCU | 4223 |
| GGCCATCAACCGGCGGAACG | 1130 | AGG | + | GGCCAUCAACCGGCGGAACG | 4224 |
| AGGCGTTGAGAGGAGTGCGC | 1131 | CGG | + | AGGCGUUGAGAGGAGUGCGC | 4225 |
| TGTCCTGCCCTATACCCGGA | 1132 | GGG | − | UGUCCUGCCCUAUACCCGGA | 4226 |
| ATGCTTTGGTAAACATTTCT | 1133 | AGG | − | AUGCUUUGGUAAACAUUUCU | 4227 |
| GTGGGCCATGTGAGGCTTTG | 1134 | TGG | − | GUGGGCCAUGUGAGGCUUUG | 4228 |
| GGCGGGATAATCACTTGAGC | 1135 | TGG | − | GGCGGGAUAAUCACUUGAGC | 4229 |
| CTGGTGACAATATAATTCCA | 1136 | AGG | + | CUGGUGACAAUAUAAUUCCA | 4230 |
| GGCCAGCTTCAGGAGGGAGG | 1137 | GGG | + | GGCCAGCUUCAGGAGGGAGG | 4231 |
| TAGGACTGGGCCTTCTGAAA | 1138 | TGG | − | UAGGACUGGGCCUUCUGAAA | 4232 |
| TCCCTTGCATGCCCTGAGAT | 1139 | GGG | + | UCCCUUGCAUGCCCUGAGAU | 4233 |
| GTCCCCTTGTCCCCATCTCA | 1140 | GGG | − | GUCCCCUUGUCCCCAUCUCA | 4234 |
| TGTGTGATATTCCTTCCCTC | 1141 | CGG | + | UGUGUGAUAUUCCUUCCCUC | 4235 |
| CTGCCCTATACCCGGAGGGA | 1142 | AGG | − | CUGCCCUAUACCCGGAGGGA | 4236 |
| CTTAAAATCCAACAGAAAAC | 1143 | AGG | + | CUUAAAAUCCAACAGAAAAC | 4237 |
| ACATAGGAAGCCAGGTGCGG | 1144 | TGG | − | ACAUAGGAAGCCAGGUGCGG | 4238 |
| GTGGCAGTGGAAGTGTTAAG | 1145 | TGG | − | GUGGCAGUGGAAGUGUUAAG | 4239 |
| CCCTTGCATGCCCTGAGATG | 1146 | GGG | + | CCCUUGCAUGCCCUGAGAUG | 4240 |
| GGTCCCCTTGTCCCCATCTC | 1147 | AGG | − | GGUCCCCUUGUCCCCAUCUC | 4241 |
| ATAAATCCCGAGAGGTGGGC | 1148 | AGG | + | AUAAAUCCCGAGAGGUGGGC | 4242 |
| TATGAGCATTTCCAGTTTGG | 1149 | GGG | + | UAUGAGCAUUUCCAGUUUGG | 4243 |
| TATTTGTAATACCCCCAAAC | 1150 | TGG | − | UAUUUGUAAUACCCCCAAAC | 4244 |
| GCCCAGGAGAGACAGCAGTG | 1151 | TGG | + | GCCCAGGAGAGACAGCAGUG | 4245 |
| TCACTTTTTAAATAGCAAAG | 1152 | TGG | + | UCACUUUUUAAAUAGCAAAG | 4246 |
| TCTGTGCTCTGCAAATGACC | 1153 | TGG | + | UCUGUGCUCUGCAAAUGACC | 4247 |
| AGGTCATTCTGCAAACCCCA | 1154 | AGG | + | AGGUCAUUCUGCAAACCCCA | 4248 |
| TAGGTTTGTCTATAATGTAC | 1155 | AGG | − | UAGGUUUGUCUAUAAUGUAC | 4249 |
| ACCTTCTCAAGTAGCAATGA | 1156 | AGG | − | ACCUUCUCAAGUAGCAAUGA | 4250 |
| GTATGGGTTTCTATAATCTG | 1157 | TGG | + | GUAUGGGUUUCUAUAAUCUG | 4251 |
| TACCAATCTTTGTGCATGGC | 1158 | TGG | + | UACCAAUCUUUGUGCAUGGC | 4252 |
| GACGTGCAGAAGGCGTTGAG | 1159 | AGG | + | GACGUGCAGAAGGCGUUGAG | 4253 |
| CTCACTTATCTCAAGGTTCA | 1160 | TGG | + | CUCACUUAUCUCAAGGUUCA | 4254 |
| TTCAGGAGAGAAAGGGTCAA | 1161 | GGG | + | UUCAGGAGAGAAAGGGUCAA | 4255 |
| TAGGACTTCTTCGCATCGCG | 1162 | GGG | − | UAGGACUUCUUCGCAUCGCG | 4256 |
| CTGCTCTTCGTGGACATTTC | 1163 | TGG | − | CUGCUCUUCGUGGACAUUUC | 4257 |
| AGAAATAGAGAAAAGAGGCC | 1164 | AGG | + | AGAAAUAGAGAAAAGAGGCC | 4258 |
| ACTGGTTACTCACCCGCTAT | 1165 | GGG | − | ACUGGUUACUCACCCGCUAU | 4259 |
| AGGACTTCTTCGCATCGCGG | 1166 | GGG | − | AGGACUUCUUCGCAUCGCGG | 4260 |
| CAACACGAATCTGAACAAAC | 1167 | AGG | − | CAACACGAAUCUGAACAAAC | 4261 |
| AGAAGTGATATGCTTCAATT | 1168 | AGG | + | AGAAGUGAUAUGCUUCAAUU | 4262 |
| GATAATCACTTGAGCTGGGG | 1169 | AGG | − | GAUAAUCACUUGAGCUGGGG | 4263 |
| ATATGAGCATTTCCAGTTTG | 1170 | GGG | + | AUAUGAGCAUUUCCAGUUUG | 4264 |
| CGGGATAATCACTTGAGCTG | 1171 | GGG | − | CGGGAUAAUCACUUGAGCUG | 4265 |
| CGGGAGAATCGTCTGATTGC | 1172 | TGG | + | CGGGAGAAUCGUCUGAUUGC | 4266 |
| TCACCAAAGGAGAAGCAACA | 1173 | TGG | − | UCACCAAAGGAGAAGCAACA | 4267 |
| GGGGAGGAGGATGATCTGTT | 1174 | TGG | − | GGGGAGGAGGAUGAUCUGUU | 4268 |
| CGTTGGATGAAGGTTCATTT | 1175 | CGG | + | CGUUGGAUGAAGGUUCAUUU | 4269 |
| AGGTCAATTCTGCCCATAGC | 1176 | GGG | + | AGGUCAAUUCUGCCCAUAGC | 4270 |
| ATGGCCAGCTTCAGGAGGGA | 1177 | GGG | + | AUGGCCAGCUUCAGGAGGGA | 4271 |
| AAATTTATTTCGTACAATAC | 1178 | TGG | + | AAAUUUAUUUCGUACAAUAC | 4272 |
| GAAGAGCGCACGATAGACGC | 1179 | CGG | + | GAAGAGCGCACGAUAGACGC | 4273 |
| CCACTGCTTCTGTCCTTCAG | 1180 | TGG | + | CCACUGCUUCUGUCCUUCAG | 4274 |
| CAAAGAAATTCTATGGACGG | 1181 | AGG | + | CAAAGAAAUUCUAUGGACGG | 4275 |
| AAGGATGAGGTCGGGTGCAG | 1182 | TGG | + | AAGGAUGAGGUCGGGUGCAG | 4276 |
| GATCAAAGGGTATGATCTAA | 1183 | TGG | + | GAUCAAAGGGUAUGAUCUAA | 4277 |
| TTTTGTGTCCACTGTAGGCT | 1184 | TGG | − | UUUUGUGUCCACUGUAGGCU | 4278 |
| AGGGAAGGAATATCACACAG | 1185 | GGG | − | AGGGAAGGAAUAUCACACAG | 4279 |
| CTAGGACTTCTTCGCATCGC | 1186 | GGG | − | CUAGGACUUCUUCGCAUCGC | 4280 |
| ACCAATCTTTGTGCATGGCT | 1187 | GGG | + | ACCAAUCUUUGUGCAUGGCU | 4281 |
| TTGGCGACAACATATTGTAA | 1188 | TGG | − | UUGGCGACAACAUAUUGUAA | 4282 |
| TGGCCAGCTTCAGGAGGGAG | 1189 | GGG | + | UGGCCAGCUUCAGGAGGGAG | 4283 |
| GGGAGGAGGATGATCTGTTT | 1190 | GGG | − | GGGAGGAGGAUGAUCUGUUU | 4284 |
| TAGGGAAGCCCTCACTGAGA | 1191 | AGG | − | UAGGGAAGCCCUCACUGAGA | 4285 |
| AAGGTCAATTCTGCCCATAG | 1192 | CGG | + | AAGGUCAAUUCUGCCCAUAG | 4286 |
| ATCTAATTGTGGCACAGTGA | 1193 | GGG | + | AUCUAAUUGUGGCACAGUGA | 4287 |
| TACTGGAGGGGGGCAGCGCG | 1194 | TGG | + | UACUGGAGGGGGGCAGCGCG | 4288 |
| CATCTAATTGTGGCACAGTG | 1195 | AGG | + | CAUCUAAUUGUGGCACAGUG | 4289 |
| GCTCTGAAGCACTTGAAATG | 1196 | TGG | + | GCUCUGAAGCACUUGAAAUG | 4290 |
| CTATGTCTTATAATTGAGTC | 1197 | AGG | + | CUAUGUCUUAUAAUUGAGUC | 4291 |
| TTTATTTCGTACAATACTGG | 1198 | AGG | + | UUUAUUUCGUACAAUACUGG | 4292 |
| AATCCCGAGAGGTGGGCAGG | 1199 | AGG | + | AAUCCCGAGAGGUGGGCAGG | 4293 |
| GTATAGCGCCAAGCCTACAG | 1200 | TGG | + | GUAUAGCGCCAAGCCUACAG | 4294 |
| AACCGGAATGCTATTGACGG | 1201 | TGG | + | AACCGGAAUGCUAUUGACGG | 4295 |
| TTGTTTTGTTCAAAATGTCT | 1202 | GGG | + | UUGUUUUGUUCAAAAUGUCU | 4296 |
| TCTAGGACTTCTTCGCATCG | 1203 | CGG | − | UCUAGGACUUCUUCGCAUCG | 4297 |
| CCTAGTTTAGTCTCTTGGAT | 1204 | TGG | − | CCUAGUUUAGUCUCUUGGAU | 4298 |
| TTTAAATTCCAATACCACAT | 1205 | GGG | + | UUUAAAUUCCAAUACCACAU | 4299 |
| AGCATCCTTTGAACTTTAGA | 1206 | AGG | − | AGCAUCCUUUGAACUUUAGA | 4300 |
| GCGGGATAATCACTTGAGCT | 1207 | GGG | − | GCGGGAUAAUCACUUGAGCU | 4301 |
| ACTCTGTAACACACGCCTGC | 1208 | TGG | + | ACUCUGUAACACACGCCUGC | 4302 |
| AAGCGTTTTGCGCAGGAGAG | 1209 | TGG | + | AAGCGUUUUGCGCAGGAGAG | 4303 |
| AGAGCTTTGGCCGAGGACGA | 1210 | | + | AGAGCUUUGGCCGAGGACGA | 4304 |
| AGAGACAGAAAGTCGATCCG | 1211 | TGG | − | AGAGACAGAAAGUCGAUCCG | 4305 |
| CTATTAAAAAGGATGAGGTC | 1212 | GGG | + | CUAUUAAAAAGGAUGAGGUC | 4306 |
| TGAAGGACAGAAGCAGTGGA | 1213 | GGG | − | UGAAGGACAGAAGCAGUGGA | 4307 |
| CTGAAGGACAGAAGCAGTGG | 1214 | AGG | − | CUGAAGGACAGAAGCAGUGG | 4308 |
| TACCTTATTTCACTGTAATG | 1215 | AGG | − | UACCUUAUUUCACUGUAAUG | 4309 |
| AATTAGACCTGCCCAGTTAG | 1216 | TGG | + | AAUUAGACCUGCCCAGUUAG | 4310 |
| CTGATATCCACTAACTGGGC | 1217 | AGG | − | CUGAUAUCCACUAACUGGGC | 4311 |
| ATTGCTGATATCCACTAACT | 1218 | GGG | − | AUUGCUGAUAUCCACUAACU | 4312 |
| CAGGCTGTCAGGAGGCATGA | 1219 | AGG | + | CAGGCUGUCAGGAGGCAUGA | 4313 |
| AAATATCTTACTTCATTACT | 1220 | TGG | + | AAAUAUCUUACUUCAUUACU | 4314 |
| TTTTCTGGTATGATACTATT | 1221 | AGG | + | UUUUCUGGUAUGAUACUAUU | 4315 |
| CTGGTATGATACTATTAGGT | 1222 | TGG | + | CUGGUAUGAUACUAUUAGGU | 4316 |
| ATCTCTTGATGAACAGCTAC | 1223 | AGG | + | AUCUCUUGAUGAACAGCUAC | 4317 |
| GATGAACAGCTACAGGCCTG | 1224 | AGG | + | GAUGAACAGCUACAGGCCUG | 4318 |
| ACAGCTACAGGCCTGAGGTT | 1225 | AGG | + | ACAGCUACAGGCCUGAGGUU | 4319 |
| CTACATGAACTCCTAACCTC | 1226 | AGG | − | CUACAUGAACUCCUAACCUC | 4320 |
| GTCCTTCAGCCTCAACTTAT | 1227 | AGG | + | GUCCUUCAGCCUCAACUUAU | 4321 |
| CACCTATAAGTTGAGGCTGA | 1228 | AGG | − | CACCUAUAAGUUGAGGCUGA | 4322 |
| ACACAGTCACCTATAAGTTG | 1229 | AGG | − | ACACAGUCACCUAUAAGUUG | 4323 |
| TCGTTAACTCCGCAGAGCAC | 1230 | AGG | + | UCGUUAACUCCGCAGAGCAC | 4324 |
| CGTTAACTCCGCAGAGCACA | 1231 | GGG | + | CGUUAACUCCGCAGAGCACA | 4325 |
| GGATGGTGCCCTGTGCTCTG | 1232 | CGG | − | GGAUGGUGCCCUGUGCUCUG | 4326 |
| CTATCCCCAGCACCTAAAGC | 1233 | TGG | + | CUAUCCCCAGCACCUAAAGC | 4327 |
| TATCCCCAGCACCTAAAGCT | 1234 | GGG | + | UAUCCCCAGCACCUAAAGCU | 4328 |
| GGTAGGGATTTAGGAAAAAG | 1235 | AGG | + | GGUAGGGAUUUAGGAAAAAG | 4329 |
| AGGGATTTAGGAAAAAGAGG | 1236 | AGG | + | AGGGAUUUAGGAAAAAGAGG | 4330 |
| TTTAGGAAAAAGAGGAGGCT | 1237 | TGG | + | UUUAGGAAAAAGAGGAGGCU | 4331 |
| AGGAAAAAGAGGAGGCTTGG | 1238 | AGG | + | AGGAAAAAGAGGAGGCUUGG | 4332 |
| GATCATCTAGCACATGTTTT | 1239 | TGG | + | GAUCAUCUAGCACAUGUUUU | 4333 |
| CTAGCACATGTTTTTGGTTT | 1240 | TGG | + | CUAGCACAUGUUUUUGGUUU | 4334 |
| TATCTGGTGGGTAGCTACTT | 1241 | AGG | + | UAUCUGGUGGGUAGCUACUU | 4335 |
| GGTGGGTAGCTACTTAGGAG | 1242 | TGG | + | GGUGGGUAGCUACUUAGGAG | 4336 |
| CCTGCTTCCTGCTTCATCCC | 1243 | TGG | + | CCUGCUUCCUGCUUCAUCCC | 4337 |
| GAAGGTGCCAGGGATGAAGC | 1244 | AGG | − | GAAGGUGCCAGGGAUGAAGC | 4338 |
| TTGCCCCTTCCGCCATGGGA | 1245 | GGG | − | UUGCCCCUUCCGCCAUGGGA | 4339 |
| CTTGCCCCTTCCGCCATGGG | 1246 | AGG | − | CUUGCCCCUUCCGCCAUGGG | 4340 |
| TAGCTTGCCCCTTCCGCCAT | 1247 | GGG | − | UAGCUUGCCCCUUCCGCCAU | 4341 |
| CTAGCTTGCCCCTTCCGCCA | 1248 | TGG | − | CUAGCUUGCCCCUUCCGCCA | 4342 |
| ACTAACATTCACATCATAGC | 1249 | AGG | + | ACUAACAUUCACAUCAUAGC | 4343 |
| CTAACATTCACATCATAGCA | 1250 | GGG | + | CUAACAUUCACAUCAUAGCA | 4344 |
| TCACATCATAGCAGGGACTC | 1251 | TGG | + | UCACAUCAUAGCAGGGACUC | 4345 |
| CATCATAGCAGGGACTCTGG | 1252 | TGG | + | CAUCAUAGCAGGGACUCUGG | 4346 |
| GGGAGCGCCATCTTTGTAGC | 1253 | AGG | − | GGGAGCGCCAUCUUUGUAGC | 4347 |
| TCAAGTAGCAATGAAGGTTA | 1254 | GGG | − | UCAAGUAGCAAUGAAGGUUA | 4348 |
| CTCAAGTAGCAATGAAGGTT | 1255 | AGG | − | CUCAAGUAGCAAUGAAGGUU | 4349 |
| GGAAGACCTGTGCATTTTTG | 1256 | TGG | + | GGAAGACCUGUGCAUUUUUG | 4350 |
| AACTGTCCACAAAAATGCAC | 1257 | AGG | − | AACUGUCCACAAAAAUGCAC | 4351 |
| ATTTATTTTTAGCAGAGACA | 1258 | GGG | + | AUUUAUUUUUAGCAGAGACA | 4352 |
| GGTTGGTGCAAGAGTAACTG | 1259 | CGG | + | GGUUGGUGCAAGAGUAACUG | 4353 |
| ATATCGGCTCACTGCAACCC | 1260 | GGG | + | AUAUCGGCUCACUGCAACCC | 4354 |
| AGCCAGCATCTTCTCTCCCT | 1261 | CGG | + | AGCCAGCAUCUUCUCUCCCU | 4355 |
| CACCTGTGATCCGAGCTACT | 1262 | TGG | − | CACCUGUGAUCCGAGCUACU | 4356 |
| TACTCGGGGGAGGCTGAAGC | 1263 | GGG | + | UACUCGGGGGAGGCUGAAGC | 4357 |
| GAACGAGGTGGAGTTTGGCC | 1264 | AGG | + | GAACGAGGUGGAGUUUGGCC | 4358 |
| GCATCACTGCACCTCAGTCT | 1265 | GGG | − | GCAUCACUGCACCUCAGUCU | 4359 |
| TGGGTTTTGCCATATTGCTC | 1266 | AGG | − | UGGGUUUUGCCAUAUUGCUC | 4360 |
| CTACTTAGGAGTGGAATTGC | 1267 | TGG | + | CUACUUAGGAGUGGAAUUGC | 4361 |
| TTCAGCCTCCCCCGAGTAGC | 1268 | TGG | − | UUCAGCCUCCCCCGAGUAGC | 4362 |
| CACTTCCACTGCCACCACCC | 1269 | TGG | + | CACUUCCACUGCCACCACCC | 4363 |
| TGCATCACTGCACCTCAGTC | 1270 | TGG | − | UGCAUCACUGCACCUCAGUC | 4364 |
| TCCACAGCCTTGTCAACACT | 1271 | AGG | + | UCCACAGCCUUGUCAACACU | 4365 |
| CTCTGGGGGAGCATACAGAC | 1272 | GGG | − | CUCUGGGGGAGCAUACAGAC | 4366 |
| TCCCCCAGAGGTTTGAGCAG | 1273 | CGG | + | UCCCCCAGAGGUUUGAGCAG | 4367 |
| AGGGAGAGAAGATGCTGGCT | 1274 | TGG | − | AGGGAGAGAAGAUGCUGGCU | 4368 |
| TCTTAGCCTAGGAAGATTCA | 1275 | GGG | − | UCUUAGCCUAGGAAGAUUCA | 4369 |
| GTATCTCAGGGTTCTTGCCT | 1276 | TGG | − | GUAUCUCAGGGUUCUUGCCU | 4370 |
| CTCAAGTGGTTTGCCCGCCT | 1277 | CGG | + | CUCAAGUGGUUUGCCCGCCU | 4371 |
| CAAAACCAGCCTGAGCAATA | 1278 | TGG | + | CAAAACCAGCCUGAGCAAUA | 4372 |
| TGAGGCGGGTCTATCACCTG | 1279 | AGG | + | UGAGGCGGGUCUAUCACCUG | 4373 |
| TGCCCAGGGGCTGGGGGAGG | 1280 | GGG | − | UGCCCAGGGGCUGGGGGAGG | 4374 |
| CAGCCATGAGCCACTGCGTC | 1281 | CGG | + | CAGCCAUGAGCCACUGCGUC | 4375 |
| TAAGATGTGGGGCCTTTGGG | 1282 | AGG | − | UAAGAUGUGGGGCCUUUGGG | 4376 |
| CAAAAAGTATCTGGGCATGA | 1283 | TGG | + | CAAAAAGUAUCUGGGCAUGA | 4377 |
| TTAAATTAATTAAAATTGGC | 1284 | CGG | − | UUAAAUUAAUUAAAAUUGGC | 4378 |
| TGGAAGTGAGCAGAGAGAGA | 1285 | AGG | − | UGGAAGUGAGCAGAGAGAGA | 4379 |
| CCGTCTGTATGCTCCCCCAG | 1286 | AGG | + | CCGUCUGUAUGCUCCCCCAG | 4380 |
| CAGCATTTGGGCACGAAGGC | 1287 | AGG | − | CAGCAUUUGGGCACGAAGGC | 4381 |
| CATGCCCTGAGATGGGGACA | 1288 | AGG | + | CAUGCCCUGAGAUGGGGACA | 4382 |
| ACTTCCACTGCCACCACCCT | 1289 | GGG | + | ACUUCCACUGCCACCACCCU | 4383 |
| TTTACAGCTGAGGCCCCAGC | 1290 | AGG | − | UUUACAGCUGAGGCCCCAGC | 4384 |
| ATGCCCTGAGATGGGGACAA | 1291 | GGG | + | AUGCCCUGAGAUGGGGACAA | 4385 |
| TTGAATGAATGAATGCTTTG | 1292 | AGG | + | UUGAAUGAAUGAAUGCUUUG | 4386 |
| AATGCAGCATTTGGGCACGA | 1293 | AGG | − | AAUGCAGCAUUUGGGCACGA | 4387 |
| TAAAATTACAAAAATGATCC | 1294 | GGG | − | UAAAAUUACAAAAAUGAUCC | 4388 |
| GGAAGGAGCTCTCAGCAGAT | 1295 | AGG | − | GGAAGGAGCUCUCAGCAGAU | 4389 |
| AAGTATCTGGGCATGATGGC | 1296 | AGG | + | AAGUAUCUGGGCAUGAUGGC | 4390 |
| TGCCCCGCTGCTCAAACCTC | 1297 | TGG | − | UGCCCCGCUGCUCAAACCUC | 4391 |
| TGCAGCTATTAAAAAGGATG | 1298 | AGG | + | UGCAGCUAUUAAAAAGGAUG | 4392 |
| ACGCCACTGTACTCCCAGCC | 1299 | TGG | − | ACGCCACUGUACUCCCAGCC | 4393 |
| TATTGTATTTCTTGTAGAGA | 1300 | GGG | + | UAUUGUAUUUCUUGUAGAGA | 4394 |
| TGAGTCTCGCTCAGTCACCC | 1301 | AGG | − | UGAGUCUCGCUCAGUCACCC | 4395 |
| TTGGCGGAAGAAGACACAAG | 1302 | TGG | + | UUGGCGGAAGAAGACACAAG | 4396 |
| CCGAGCTACTTGGAAGACTG | 1303 | AGG | − | CCGAGCUACUUGGAAGACUG | 4397 |
| AAGGAGCTCTCAGCAGATAG | 1304 | GGG | − | AAGGAGCUCUCAGCAGAUAG | 4398 |
| TGAAGCACTTGAAATGTGGC | 1305 | TGG | + | UGAAGCACUUGAAAUGUGGC | 4399 |
| GAAGGAGCTCTCAGCAGATA | 1306 | GGG | − | GAAGGAGCUCUCAGCAGAUA | 4400 |
| GGAGGGAAGGAATATCACAC | 1307 | AGG | − | GGAGGGAAGGAAUAUCACAC | 4401 |
| GAGGGAAGGAATATCACACA | 1308 | GGG | − | GAGGGAAGGAAUAUCACACA | 4402 |
| TGGCCGGACGCAGTGGCTCA | 1309 | TGG | − | UGGCCGGACGCAGUGGCUCA | 4403 |
| CGGGTCTATCACCTGAGGTC | 1310 | AGG | + | CGGGUCUAUCACCUGAGGUC | 4404 |
| TGGCTGTAATTCTAACACTT | 1311 | TGG | − | UGGCUGUAAUUCUAACACUU | 4405 |
| GGCTGTAATTCTAACACTTT | 1312 | GGG | − | GGCUGUAAUUCUAACACUUU | 4406 |
| GGCTTGAGCCCTGGAGTTCA | 1313 | AGG | + | GGCUUGAGCCCUGGAGUUCA | 4407 |
| CCTCTGGGGGAGCATACAGA | 1314 | CGG | − | CCUCUGGGGGAGCAUACAGA | 4408 |
| GGGGGAGCATACAGACGGGC | 1315 | AGG | − | GGGGGAGCAUACAGACGGGC | 4409 |
| AGGGTCTCGCCATGCTGCCC | 1316 | AGG | + | AGGGUCUCGCCAUGCUGCCC | 4410 |
| ATGAGCCACTGCGTCCGGCC | 1317 | AGG | + | AUGAGCCACUGCGUCCGGCC | 4411 |
| GAGGAGAATCGATTGAACCC | 1318 | AGG | − | GAGGAGAAUCGAUUGAACCC | 4412 |
| CAAGGCAGGAGTATCACCTG | 1319 | AGG | + | CAAGGCAGGAGUAUCACCUG | 4413 |
| ACAAAAGGGGCCGGGCGCGG | 1320 | TGG | − | ACAAAAGGGGCCGGGCGCGG | 4414 |
| AAAAAGGATGAGTTCATGTA | 1321 | GGG | + | AAAAAGGAUGAGUUCAUGUA | 4415 |
| CTGTCGTGGGGTGGGGGAGC | 1322 | GGG | + | CUGUCGUGGGGUGGGGGAGC | 4416 |
| CGCCACTGTACTCCCAGCCT | 1323 | GGG | − | CGCCACUGUACUCCCAGCCU | 4417 |
| TGCCCAGGCTGGGAGTACAG | 1324 | TGG | + | UGCCCAGGCUGGGAGUACAG | 4418 |
| CAAAAATACAAAAAGTATCT | 1325 | GGG | + | CAAAAAUACAAAAAGUAUCU | 4419 |
| ACAAAAATACAAAAAGTATC | 1326 | TGG | + | ACAAAAAUACAAAAAGUAUC | 4420 |
| CGGGCAAACCACTTGAGGTC | 1327 | AGG | − | CGGGCAAACCACUUGAGGUC | 4421 |
| TTGTATCTTTAGTAGAGCCA | 1328 | GGG | + | UUGUAUCUUUAGUAGAGCCA | 4422 |
| AATAAATTAGCCGGATGTGG | 1329 | TGG | − | AAUAAAUUAGCCGGAUGUGG | 4423 |
| GAGACAGGGTTTCAGCATGC | 1330 | TGG | + | GAGACAGGGUUUCAGCAUGC | 4424 |
| CCCCCAGAGGTTTGAGCAGC | 1331 | GGG | + | CCCCCAGAGGUUUGAGCAGC | 4425 |
| AAAAAAGGATGAGTTCATGT | 1332 | AGG | + | AAAAAAGGAUGAGUUCAUGU | 4426 |
| AGCACCACTGCACTCCAGTG | 1333 | TGG | + | AGCACCACUGCACUCCAGUG | 4427 |
| CAGGTGTCCTGCCCTATACC | 1334 | CGG | − | CAGGUGUCCUGCCCUAUACC | 4428 |
| GCTTGTAGTCCCAGCTACCA | 1335 | TGG | + | GCUUGUAGUCCCAGCUACCA | 4429 |
| GATGAGTTCATGTAGGGACA | 1336 | TGG | + | GAUGAGUUCAUGUAGGGACA | 4430 |
| CCATGGGAGGCTGAGGTGAG | 1337 | AGG | + | CCAUGGGAGGCUGAGGUGAG | 4431 |
| TATTTATTTTTAGCAGAGAC | 1338 | AGG | + | UAUUUAUUUUUAGCAGAGAC | 4432 |
| TTTGTATCTTTAGTAGAGCC | 1339 | AGG | + | UUUGUAUCUUUAGUAGAGCC | 4433 |
| AGACGGGGTTTCACCAGGTT | 1340 | GGG | − | AGACGGGGUUUCACCAGGUU | 4434 |
| GGGCTTGCAGAATGAGTGCA | 1341 | AGG | − | GGGCUUGCAGAAUGAGUGCA | 4435 |
| GGCCTGCTTCAGGGAAGAAG | 1342 | AGG | + | GGCCUGCUUCAGGGAAGAAG | 4436 |
| AGGGTTTCAGCATGCTGGCC | 1343 | AGG | + | AGGGUUUCAGCAUGCUGGCC | 4437 |
| TGAGACCAGCCTGCCCAACC | 1344 | TGG | + | UGAGACCAGCCUGCCCAACC | 4438 |
| CAGGCATGAGCTACCCCGCC | 1345 | CGG | + | CAGGCAUGAGCUACCCCGCC | 4439 |
| AAAAAAAAAAAAACAAGTCT | 1346 | GGG | + | AAAAAAAAAAAAACAAGUCU | 4440 |
| ATAAAATACCATAAACTAGG | 1347 | TGG | + | AUAAAAUACCAUAAACUAGG | 4441 |
| GCCGGTAATCCCAGTTACTC | 1348 | AGG | + | GCCGGUAAUCCCAGUUACUC | 4442 |
| TGTTAATTTTTTTGTAGAGA | 1349 | CGG | − | UGUUAAUUUUUUUGUAGAGA | 4443 |
| CTCAAACTTCTGAGCTCAAG | 1350 | GGG | + | CUCAAACUUCUGAGCUCAAG | 4444 |
| ATACTATGCAGCTATTAAAA | 1351 | AGG | + | AUACUAUGCAGCUAUUAAAA | 4445 |
| AGAAAAGAGGCCAGGTGCAG | 1352 | GGG | + | AGAAAAGAGGCCAGGUGCAG | 4446 |
| GTTAATTTTTTTGTAGAGAC | 1353 | GGG | − | GUUAAUUUUUUUGUAGAGAC | 4447 |
| CTTCAGGAGGCCAAGGCCAG | 1354 | AGG | + | CUUCAGGAGGCCAAGGCCAG | 4448 |
| CAAAAATGATCCGGGCGTGG | 1355 | TGG | − | CAAAAAUGAUCCGGGCGUGG | 4449 |
| GCACAGGATGGGGGCGTGGT | 1356 | GGG | − | GCACAGGAUGGGGGCGUGGU | 4450 |
| GGTCTGGAACTCTCGACCTC | 1357 | AGG | − | GGUCUGGAACUCUCGACCUC | 4451 |
| TGCCAAATAGTTTTCCAAAG | 1358 | AGG | + | UGCCAAAUAGUUUUCCAAAG | 4452 |
| CCTGTCACATGAGGGTCTTC | 1359 | AGG | + | CCUGUCACAUGAGGGUCUUC | 4453 |
| CCTCTAATCCCAGCTACTCG | 1360 | GGG | + | CCUCUAAUCCCAGCUACUCG | 4454 |
| GGCTGGGAAGTCCACGATCA | 1361 | AGG | + | GGCUGGGAAGUCCACGAUCA | 4455 |
| CCTGAAGACCCTCATGTGAC | 1362 | AGG | − | CCUGAAGACCCUCAUGUGAC | 4456 |
| CGGAAGAAGACACAAGTGGC | 1363 | TGG | + | CGGAAGAAGACACAAGUGGC | 4457 |
| GCAGGACACCTGTCACATGA | 1364 | GGG | + | GCAGGACACCUGUCACAUGA | 4458 |
| TGTCACATGAGGGTCTTCAG | 1365 | GGG | + | UGUCACAUGAGGGUCUUCAG | 4459 |
| CAGCAGATAGGGGAGCCAGA | 1366 | AGG | − | CAGCAGAUAGGGGAGCCAGA | 4460 |
| GGGTTTTCACCATGTTTCCC | 1367 | AGG | + | GGGUUUUCACCAUGUUUCCC | 4461 |
| CCCCGAGTAGCTGGGATTAG | 1368 | AGG | − | CCCCGAGUAGCUGGGAUUAG | 4462 |
| CACTTGAGCTGGGGAGGCGG | 1369 | AGG | − | CACUUGAGCUGGGGAGGCGG | 4463 |
| ATCAAGGTGCCAGCAGATTT | 1370 | GGG | + | AUCAAGGUGCCAGCAGAUUU | 4464 |
| CTGTCACATGAGGGTCTTCA | 1371 | GGG | + | CUGUCACAUGAGGGUCUUCA | 4465 |
| GTCCGTGGGCACAGGCCTGG | 1372 | GGG | − | GUCCGUGGGCACAGGCCUGG | 4466 |
| GGCAGGACACCTGTCACATG | 1373 | AGG | + | GGCAGGACACCUGUCACAUG | 4467 |
| AGCAGATAGGGGAGCCAGAA | 1374 | GGG | − | AGCAGAUAGGGGAGCCAGAA | 4468 |
| CGCTTGTGTGTCTGCCTGCT | 1375 | AGG | − | CGCUUGUGUGUCUGCCUGCU | 4469 |
| CCGGCATGCGCCACCATGCC | 1376 | TGG | − | CCGGCAUGCGCCACCAUGCC | 4470 |
| CCAGACCAGCCTGGCCAAGG | 1377 | TGG | − | CCAGACCAGCCUGGCCAAGG | 4471 |
| CGTGGGCACAGGCCTGGGGG | 1378 | TGG | − | CGUGGGCACAGGCCUGGGGG | 4472 |
| AGAAAACTGCAGAAGCAGGA | 1379 | AGG | − | AGAAAACUGCAGAAGCAGGA | 4473 |
| CTCTAATCCCAGCTACTCGG | 1380 | GGG | + | CUCUAAUCCCAGCUACUCGG | 4474 |
| GGATGGGGGCGTGGTGGGCC | 1381 | AGG | − | GGAUGGGGGCGUGGUGGGCC | 4475 |
| CTCAGGTGATACTCCTGCCT | 1382 | TGG | − | CUCAGGUGAUACUCCUGCCU | 4476 |
| CCACCTTGGCCAGGCTGGTC | 1383 | TGG | + | CCACCUUGGCCAGGCUGGUC | 4477 |
| GTCTTGGGAAATGCAGCATT | 1384 | TGG | − | GUCUUGGGAAAUGCAGCAUU | 4478 |
| CCAGGCATGGTGGCGCATGC | 1385 | CGG | + | CCAGGCAUGGUGGCGCAUGC | 4479 |
| CGGAAGAATCAGATCACACG | 1386 | TGG | − | CGGAAGAAUCAGAUCACACG | 4480 |
| GGGGTTTCACCAGGTTGGGC | 1387 | AGG | − | GGGGUUUCACCAGGUUGGGC | 4481 |
| TCACTGATGGACGTTTGGGT | 1388 | TGG | − | UCACUGAUGGACGUUUGGGU | 4482 |
| AACGTCCATCAGTGATAGAC | 1389 | TGG | + | AACGUCCAUCAGUGAUAGAC | 4483 |
| TCTATCACTGATGGACGTTT | 1390 | GGG | − | UCUAUCACUGAUGGACGUUU | 4484 |
| GATGGGGGCGTGGTGGGCCA | 1391 | GGG | − | GAUGGGGGCGUGGUGGGCCA | 4485 |
| GCGAGGAACATCACACACTG | 1392 | GGG | + | GCGAGGAACAUCACACACUG | 4486 |
| AATCACTTGAGCTGGGGAGG | 1393 | CGG | − | AAUCACUUGAGCUGGGGAGG | 4487 |
| CAGGAGTATCACCTGAGGTC | 1394 | AGG | + | CAGGAGUAUCACCUGAGGUC | 4488 |
| GTGGGGTGGGGGAGCGGGGA | 1395 | GGG | + | GUGGGGUGGGGGAGCGGGGA | 4489 |
| TTTCACCAGGTTGGGCAGGC | 1396 | TGG | − | UUUCACCAGGUUGGGCAGGC | 4490 |
| TCTTGGGAAATGCAGCATTT | 1397 | GGG | − | UCUUGGGAAAUGCAGCAUUU | 4491 |
| GTTCCAGACCAGCCTGGCCA | 1398 | AGG | − | GUUCCAGACCAGCCUGGCCA | 4492 |
| TCTCGCCATGCTGCCCAGGC | 1399 | TGG | + | UCUCGCCAUGCUGCCCAGGC | 4493 |
| TTTCAGCATGCTGGCCAGGC | 1400 | TGG | + | UUUCAGCAUGCUGGCCAGGC | 4494 |
| GGGGGCGTGGTGGGCCAGGG | 1401 | TGG | − | GGGGGCGUGGUGGGCCAGGG | 4495 |
| GTCTATCACTGATGGACGTT | 1402 | TGG | − | GUCUAUCACUGAUGGACGUU | 4496 |
| TAACACAAGCCGCCTACAGA | 1403 | CGG | + | UAACACAAGCCGCCUACAGA | 4497 |
| AATAGCTGCATAGTATTCCA | 1404 | TGG | − | AAUAGCUGCAUAGUAUUCCA | 4498 |
| TCCTGCCTCAGGCTCCCGAG | 1405 | TGG | + | UCCUGCCUCAGGCUCCCGAG | 4499 |
| CTAGCAGGCAGACACACAAG | 1406 | CGG | + | CUAGCAGGCAGACACACAAG | 4500 |
| GCCACTCGGGAGCCTGAGGC | 1407 | AGG | − | GCCACUCGGGAGCCUGAGGC | 4501 |
| AGGTCCGTGGGCACAGGCCT | 1408 | GGG | − | AGGUCCGUGGGCACAGGCCU | 4502 |
| GCCTCAGGCTCCCGAGTGGC | 1409 | TGG | + | GCCUCAGGCUCCCGAGUGGC | 4503 |
| CCCAGCCACTCGGGAGCCTG | 1410 | AGG | − | CCCAGCCACUCGGGAGCCUG | 4504 |
| TGTAGAGACGGGGTTTCACC | 1411 | AGG | − | UGUAGAGACGGGGUUUCACC | 4505 |
| ACTGCCACTGTACTCCAGCC | 1412 | TGG | + | ACUGCCACUGUACUCCAGCC | 4506 |
| TCTCAAACTTCTGAGCTCAA | 1413 | GGG | + | UCUCAAACUUCUGAGCUCAA | 4507 |
| GTCTCAAACTTCTGAGCTCA | 1414 | AGG | + | GUCUCAAACUUCUGAGCUCA | 4508 |
| CCTCAGGCTCCCGAGTGGCT | 1415 | GGG | + | CCUCAGGCUCCCGAGUGGCU | 4509 |
| AGGCCTGTGCCCACGGACCT | 1416 | AGG | + | AGGCCUGUGCCCACGGACCU | 4510 |
| ACCTGTAATCCCAGCCACCT | 1417 | GGG | − | ACCUGUAAUCCCAGCCACCU | 4511 |
| AGAGTCTCGCTGTGTTGCTC | 1418 | AGG | + | AGAGUCUCGCUGUGUUGCUC | 4512 |
| TAGGTCCGTGGGCACAGGCC | 1419 | TGG | − | UAGGUCCGUGGGCACAGGCC | 4513 |
| CACCCCCAGGCCTGTGCCCA | 1420 | CGG | + | CACCCCCAGGCCUGUGCCCA | 4514 |
| TCAGCCTCCCCCGAGTAGCT | 1421 | GGG | − | UCAGCCUCCCCCGAGUAGCU | 4515 |
| GGCACAGGATGGGGGCGTGG | 1422 | TGG | − | GGCACAGGAUGGGGGCGUGG | 4516 |
| GCTTGTGTGTCTGCCTGCTA | 1423 | GGG | − | GCUUGUGUGUCUGCCUGCUA | 4517 |
| CCTCTCACCTCAGCCTCCCA | 1424 | TGG | − | CCUCUCACCUCAGCCUCCCA | 4518 |
| ATAATAAAATACCATAAACT | 1425 | AGG | + | AUAAUAAAAUACCAUAAACU | 4519 |
| CACCTGTAATCCCAGCCACC | 1426 | TGG | − | CACCUGUAAUCCCAGCCACC | 4520 |
| CGTCTGTAATCCCAGCCACT | 1427 | CGG | − | CGUCUGUAAUCCCAGCCACU | 4521 |
| AGGAGAATCACTTGAAACCC | 1428 | GGG | − | AGGAGAAUCACUUGAAACCC | 4522 |
| TAATCCCAGCTACTCGGGGG | 1429 | AGG | + | UAAUCCCAGCUACUCGGGGG | 4523 |
| GGGATTACAGCCACCATGCC | 1430 | TGG | − | GGGAUUACAGCCACCAUGCC | 4524 |
| CTGGAACTCCTGACCTCAAG | 1431 | TGG | + | CUGGAACUCCUGACCUCAAG | 4525 |
| TACTTAGGAGTGGAATTGCT | 1432 | GGG | + | UACUUAGGAGUGGAAUUGCU | 4526 |
| GGTCCGTGGGCACAGGCCTG | 1433 | GGG | − | GGUCCGUGGGCACAGGCCUG | 4527 |
| GAGCCACCATGCCCGGCCCA | 1434 | AGG | − | GAGCCACCAUGCCCGGCCCA | 4528 |
| CTTACTCTTGTCGCCCAGGC | 1435 | TGG | − | CUUACUCUUGUCGCCCAGGC | 4529 |
| CCTGTCGTGGGGTGGGGGAG | 1436 | CGG | + | CCUGUCGUGGGGUGGGGGAG | 4530 |
| AGGAGGTCGAGGCTGCAGTG | 1437 | AGG | + | AGGAGGUCGAGGCUGCAGUG | 4531 |
| GGAAGAATCAGATCACACGT | 1438 | GGG | − | GGAAGAAUCAGAUCACACGU | 4532 |
| ATACAGACGGGCAGGCTGTG | 1439 | GGG | − | AUACAGACGGGCAGGCUGUG | 4533 |
| GAGTGGAATTGCTGGGTCAT | 1440 | AGG | + | GAGUGGAAUUGCUGGGUCAU | 4534 |
| GCCTGTCATCCCAGCTACTA | 1441 | GGG | − | GCCUGUCAUCCCAGCUACUA | 4535 |
| TTTATAAGCCACCTAGTTTA | 1442 | TGG | − | UUUAUAAGCCACCUAGUUUA | 4536 |
| GCATACAGACGGGCAGGCTG | 1443 | TGG | − | GCAUACAGACGGGCAGGCUG | 4537 |
| TGGTGGGCCAGGGTGGTCTT | 1444 | GGG | − | UGGUGGGCCAGGGUGGUCUU | 4538 |
| TCACTCTGTCACCCAGACTG | 1445 | AGG | + | UCACUCUGUCACCCAGACUG | 4539 |
| CATACAGACGGGCAGGCTGT | 1446 | GGG | − | CAUACAGACGGGCAGGCUGU | 4540 |
| AACTGAACAATGAAAACACT | 1447 | TGG | + | AACUGAACAAUGAAAACACU | 4541 |
| CTTACTCTGTTGCCCAGGCT | 1448 | GGG | + | CUUACUCUGUUGCCCAGGCU | 4542 |
| GGTTTTGAACTCCTGACCTT | 1449 | AGG | − | GGUUUUGAACUCCUGACCUU | 4543 |
| GTGGTGGGCCAGGGTGGTCT | 1450 | TGG | − | GUGGUGGGCCAGGGUGGUCU | 4544 |
| CAGGTGTGCACCACCATGGC | 1451 | CGG | + | CAGGUGUGCACCACCAUGGC | 4545 |
| TCCCTAGTAGCTGGGATGAC | 1452 | AGG | + | UCCCUAGUAGCUGGGAUGAC | 4546 |
| TTTTGCCATATTGCTCAGGC | 1453 | TGG | − | UUUUGCCAUAUUGCUCAGGC | 4547 |
| ACTTGGAAGACTGAGGTGGG | 1454 | AGG | − | ACUUGGAAGACUGAGGUGGG | 4548 |
| CTCAGCACTTTGGGAGGGCG | 1455 | AGG | + | CUCAGCACUUUGGGAGGGCG | 4549 |
| GTGTCTGCCTGCTAGGGTCT | 1456 | TGG | − | GUGUCUGCCUGCUAGGGUCU | 4550 |
| TGTCATCCCAGCTACTAGGG | 1457 | AGG | − | UGUCAUCCCAGCUACUAGGG | 4551 |
| TGTGCCCACGGACCTAGGTG | 1458 | AGG | + | UGUGCCCACGGACCUAGGUG | 4552 |
| GCTACTTGGAAGACTGAGGT | 1459 | GGG | − | GCUACUUGGAAGACUGAGGU | 4553 |
| GCCCCGCTGCTCAAACCTCT | 1460 | GGG | − | GCCCCGCUGCUCAAACCUCU | 4554 |
| TCTAACACTTTGGGAGGCTG | 1461 | AGG | − | UCUAACACUUUGGGAGGCUG | 4555 |
| TCACCTAGGTCCGTGGGCAC | 1462 | AGG | − | UCACCUAGGUCCGUGGGCAC | 4556 |
| TCCCAGGTGGCTGGGATTAC | 1463 | AGG | + | UCCCAGGUGGCUGGGAUUAC | 4557 |
| AGCTACTTGGAAGACTGAGG | 1464 | TGG | − | AGCUACUUGGAAGACUGAGG | 4558 |
| CAGGCCGATCACTTGAGGTC | 1465 | AGG | − | CAGGCCGAUCACUUGAGGUC | 4559 |
| CAGACGTGTGCCACCACGCC | 1466 | CGG | + | CAGACGUGUGCCACCACGCC | 4560 |
| GTCTCAAATTCCTGGGCTCA | 1467 | AGG | − | GUCUCAAAUUCCUGGGCUCA | 4561 |
| ACTACAGGTGTGCACCACCA | 1468 | TGG | + | ACUACAGGUGUGCACCACCA | 4562 |
| GAGACAGGGTTTCACCACCT | 1469 | TGG | + | GAGACAGGGUUUCACCACCU | 4563 |
| TGTAATCCCAGCCACCTGGG | 1470 | AGG | − | UGUAAUCCCAGCCACCUGGG | 4564 |
| GACTGTAATCCCAGCACTTC | 1471 | AGG | + | GACUGUAAUCCCAGCACUUC | 4565 |
| CTCAAGCAATCCTCTGGCCT | 1472 | TGG | − | CUCAAGCAAUCCUCUGGCCU | 4566 |
| TCTCAAATTCCTGGGCTCAA | 1473 | GGG | − | UCUCAAAUUCCUGGGCUCAA | 4567 |
| AGGGTTTCACCACCTTGGCC | 1474 | AGG | + | AGGGUUUCACCACCUUGGCC | 4568 |
| CAGGCGTGAGCCCCTGCACC | 1475 | TGG | − | CAGGCGUGAGCCCCUGCACC | 4569 |
| TTGCTCAGGGTGGAGTGCAG | 1476 | TGG | + | UUGCUCAGGGUGGAGUGCAG | 4570 |
| ATAGGCACAGGATGGGGGCG | 1477 | TGG | − | AUAGGCACAGGAUGGGGGCG | 4571 |
| CACTGCAGCCTTGAACTCCA | 1478 | GGG | − | CACUGCAGCCUUGAACUCCA | 4572 |
| GCTACTAGGGAGGCTGAGGG | 1479 | AGG | − | GCUACUAGGGAGGCUGAGGG | 4573 |
| CAGGCACGCACCACCACATC | 1480 | CGG | + | CAGGCACGCACCACCACAUC | 4574 |
| GCCACCTGGGAGGCTGAGGC | 1481 | AGG | − | GCCACCUGGGAGGCUGAGGC | 4575 |
| GAAGACTGCTTGAGCCCAGG | 1482 | AGG | + | GAAGACUGCUUGAGCCCAGG | 4576 |
| TCCTGCCTCAGCCTCCCAGG | 1483 | TGG | + | UCCUGCCUCAGCCUCCCAGG | 4577 |
| TAAATAAATAAAAATTAGCC | 1484 | AGG | − | UAAAUAAAUAAAAAUUAGCC | 4578 |
| TTAATTTTTTTGTAGAGACG | 1485 | GGG | − | UUAAUUUUUUUGUAGAGACG | 4579 |
| GCCTCAGCCTCCCAGGTGGC | 1486 | TGG | + | GCCUCAGCCUCCCAGGUGGC | 4580 |
| CCCTCAGCCTCCCTAGTAGC | 1487 | TGG | + | CCCUCAGCCUCCCUAGUAGC | 4581 |
| AAAAAAAAAAAAAAAGACAT | 1488 | AGG | − | AAAAAAAAAAAAAAAGACAU | 4582 |
| AAAAAAAAAGCCAGGCACAG | 1489 | TGG | + | AAAAAAAAAGCCAGGCACAG | 4583 |
| CCTGTCCTCACCTAGGTCCG | 1490 | TGG | − | CCUGUCCUCACCUAGGUCCG | 4584 |
| AACCCGGGAGATGGAGGTTG | 1491 | TGG | − | AACCCGGGAGAUGGAGGUUG | 4585 |
| GTCTGTAATCCCAGCCACTC | 1492 | GGG | − | GUCUGUAAUCCCAGCCACUC | 4586 |
| GGGTTTCAACATATGAATTT | 1493 | TGG | + | GGGUUUCAACAUAUGAAUUU | 4587 |
| CTGTCCTCACCTAGGTCCGT | 1494 | GGG | − | CUGUCCUCACCUAGGUCCGU | 4588 |
| CCACGGACCTAGGTGAGGAC | 1495 | AGG | + | CCACGGACCUAGGUGAGGAC | 4589 |
| TCTTGCTCTGTCACCCACAC | 1496 | TGG | − | UCUUGCUCUGUCACCCACAC | 4590 |
| TCTTAAGTAGCTGGGACTAC | 1497 | AGG | − | UCUUAAGUAGCUGGGACUAC | 4591 |
| TCACCACAACCTCCATCTCC | 1498 | CGG | + | UCACCACAACCUCCAUCUCC | 4592 |
| CCAGCTACTAGGGAGGCTGA | 1499 | GGG | − | CCAGCUACUAGGGAGGCUGA | 4593 |
| AGGAGTGCCTGTCCTCACCT | 1500 | AGG | − | AGGAGUGCCUGUCCUCACCU | 4594 |
| CACCACAACCTCCATCTCCC | 1501 | GGG | + | CACCACAACCUCCAUCUCCC | 4595 |
| GTTACTCAGGAAGCTGAGGC | 1502 | AGG | + | GUUACUCAGGAAGCUGAGGC | 4596 |
| TGTAGTCCCAGCTACTTAAG | 1503 | AGG | + | UGUAGUCCCAGCUACUUAAG | 4597 |
| CCAGAGGATTGCTTGAGCCC | 1504 | AGG | + | CCAGAGGAUUGCUUGAGCCC | 4598 |
| GGCTTGAGCCTGGGAGGTTG | 1505 | AGG | − | GGCUUGAGCCUGGGAGGUUG | 4599 |
| GATCAAGGTGCCAGCAGATT | 1506 | TGG | + | GAUCAAGGUGCCAGCAGAUU | 4600 |
| CCTCAGCCTCCCAGGTGGCT | 1507 | GGG | + | CCUCAGCCUCCCAGGUGGCU | 4601 |
| GGGAGGCTGAGGTGAGAGGA | 1508 | TGG | + | GGGAGGCUGAGGUGAGAGGA | 4602 |
| CCCAGCCACCTGGGAGGCTG | 1509 | AGG | − | CCCAGCCACCUGGGAGGCUG | 4603 |
| ACAGGTGCAGCACACCAACA | 1510 | TGG | + | ACAGGUGCAGCACACCAACA | 4604 |
| GCACCACTGCACTCCAGTGT | 1511 | GGG | + | GCACCACUGCACUCCAGUGU | 4605 |
| GCCTCAGCTTCCTGAGTAAC | 1512 | TGG | − | GCCUCAGCUUCCUGAGUAAC | 4606 |
| TGAGAGGATGGCTTGAGCCC | 1513 | TGG | + | UGAGAGGAUGGCUUGAGCCC | 4607 |
| TGTAATTCTAACACTTTGGG | 1514 | AGG | − | UGUAAUUCUAACACUUUGGG | 4608 |
| CCTGGGCTCAAGCAATCCTC | 1515 | TGG | − | CCUGGGCUCAAGCAAUCCUC | 4609 |
| GAGCCAGGGTTTCACCATGT | 1516 | TGG | + | GAGCCAGGGUUUCACCAUGU | 4610 |
| GAGAATCGATTGAACCCAGG | 1517 | CGG | − | GAGAAUCGAUUGAACCCAGG | 4611 |
| GGTTTCAACATATGAATTTT | 1518 | GGG | + | GGUUUCAACAUAUGAAUUUU | 4612 |
| GGAGTGCAGTGGTGCAATAT | 1519 | CGG | + | GGAGUGCAGUGGUGCAAUAU | 4613 |
| ATACAAAAATTAGCCGGCCA | 1520 | TGG | − | AUACAAAAAUUAGCCGGCCA | 4614 |
| CCCAGTTACTCAGGAAGCTG | 1521 | AGG | + | CCCAGUUACUCAGGAAGCUG | 4615 |
| CAAAAATTAGCCGGCCATGG | 1522 | TGG | − | CAAAAAUUAGCCGGCCAUGG | 4616 |
| AAATAAAAATTAGCCAGGTG | 1523 | TGG | − | AAAUAAAAAUUAGCCAGGUG | 4617 |
| CAGGTGCATACCACCACACC | 1524 | TGG | − | CAGGUGCAUACCACCACACC | 4618 |
| GCACTTTGGGAAGCTGAGAC | 1525 | AGG | − | GCACUUUGGGAAGCUGAGAC | 4619 |
| CCTCAGCTTCCTGAGTAACT | 1526 | GGG | − | CCUCAGCUUCCUGAGUAACU | 4620 |
| CTTTGGGAGGGCGAGGTGGG | 1527 | AGG | + | CUUUGGGAGGGCGAGGUGGG | 4621 |
| GCTACTTAAGAGGCTGAGGC | 1528 | AGG | + | GCUACUUAAGAGGCUGAGGC | 4622 |
| TGGGAAGACTGCTTGAGCCC | 1529 | AGG | + | UGGGAAGACUGCUUGAGCCC | 4623 |
| GTTTCAACATATGAATTTTG | 1530 | GGG | + | GUUUCAACAUAUGAAUUUUG | 4624 |
| GCCTCAGCCTCTTAAGTAGC | 1531 | TGG | − | GCCUCAGCCUCUUAAGUAGC | 4625 |
| CAAGGCAGGTGGATCACCTA | 1532 | AGG | + | CAAGGCAGGUGGAUCACCUA | 4626 |
| TTCAACATATGAATTTTGGG | 1533 | GGG | + | UUCAACAUAUGAAUUUUGGG | 4627 |
| CTGCCACTGTACTCCAGCCT | 1534 | GGG | + | CUGCCACUGUACUCCAGCCU | 4628 |
| TTGTGTTTTTTGTAGAGACA | 1535 | GGG | + | UUGUGUUUUUUGUAGAGACA | 4629 |
| TTTCACCACCTTGGCCAGGC | 1536 | TGG | + | UUUCACCACCUUGGCCAGGC | 4630 |
| TCTCGCTCAGTCACCCAGGC | 1537 | TGG | − | UCUCGCUCAGUCACCCAGGC | 4631 |
| TGCATTTCCCAAGACCACCC | 1538 | TGG | + | UGCAUUUCCCAAGACCACCC | 4632 |
| TCTTTCTTTCTTTTTTGAGA | 1539 | TGG | − | UCUUUCUUUCUUUUUUGAGA | 4633 |
| CCTCAGTCTTCCAAGTAGCT | 1540 | CGG | + | CCUCAGUCUUCCAAGUAGCU | 4634 |
| CTTTGGGAGGACAAGGCAGG | 1541 | TGG | + | CUUUGGGAGGACAAGGCAGG | 4635 |
| GAGTGCAAGGTTTTATTGAG | 1542 | TGG | − | GAGUGCAAGGUUUUAUUGAG | 4636 |
| GTAATCTCAGCACTTTGGGA | 1543 | GGG | + | GUAAUCUCAGCACUUUGGGA | 4637 |
| CAAACATTAGCCAGGCATGG | 1544 | TGG | + | CAAACAUUAGCCAGGCAUGG | 4638 |
| TGAGACCAGCCTGGGCAGCA | 1545 | TGG | − | UGAGACCAGCCUGGGCAGCA | 4639 |
| ATACAAACATTAGCCAGGCA | 1546 | TGG | + | AUACAAACAUUAGCCAGGCA | 4640 |
| TATTATTATTATTTTGAGAC | 1547 | AGG | − | UAUUAUUAUUAUUUUGAGAC | 4641 |
| CCCAGCTACTTAAGAGGCTG | 1548 | AGG | + | CCCAGCUACUUAAGAGGCUG | 4642 |
| TCACCCACACTGGAGTGCAG | 1549 | TGG | − | UCACCCACACUGGAGUGCAG | 4643 |
| GCACTTTGGGAGGGCGAGGT | 1550 | GGG | + | GCACUUUGGGAGGGCGAGGU | 4644 |
| GAGACAGGGTTTTGCTATGT | 1551 | TGG | − | GAGACAGGGUUUUGCUAUGU | 4645 |
| CCTCAGCCTCTTAAGTAGCT | 1552 | GGG | − | CCUCAGCCUCUUAAGUAGCU | 4646 |
| AGGGTTTTGCTATGTTGGCC | 1553 | AGG | − | AGGGUUUUGCUAUGUUGGCC | 4647 |
| TTTGTGTTTTTTGTAGAGAC | 1554 | AGG | + | UUUGUGUUUUUUGUAGAGAC | 4648 |
| TTTCAACATATGAATTTTGG | 1555 | GGG | + | UUUCAACAUAUGAAUUUUGG | 4649 |
| GGGGCCTTTGGGAGGTGATT | 1556 | AGG | − | GGGGCCUUUGGGAGGUGAUU | 4650 |
| AGTGGAATTGCTGGGTCATA | 1557 | GGG | + | AGUGGAAUUGCUGGGUCAUA | 4651 |
| CACTGTAGCCTCAACCTCCC | 1558 | AGG | + | CACUGUAGCCUCAACCUCCC | 4652 |
| CAAAAAACACAAAAATTAGC | 1559 | TGG | − | CAAAAAACACAAAAAUUAGC | 4653 |
| GGAGTACAATGGCGCGATCT | 1560 | CGG | − | GGAGUACAAUGGCGCGAUCU | 4654 |
| TTTTTTTTTTCTTTTGAGAC | 1561 | TGG | − | UUUUUUUUUUCUUUUGAGAC | 4655 |
| TGGCCAACATGGTGAAACCC | 1562 | TGG | − | UGGCCAACAUGGUGAAACCC | 4656 |
| CGCTTGAACCCGGAAGGCAG | 1563 | AGG | + | CGCUUGAACCCGGAAGGCAG | 4657 |
| GAGACGGGGTTTCACCAGGT | 1564 | TGG | − | GAGACGGGGUUUCACCAGGU | 4658 |
| TGGGGCCTGTCGTGGGGTGG | 1565 | GGG | + | UGGGGCCUGUCGUGGGGUGG | 4659 |
| TCTCAGCTTCCCAAAGTGCT | 1566 | AGG | + | UCUCAGCUUCCCAAAGUGCU | 4660 |
| CTGGGGCCTGTCGTGGGGTG | 1567 | GGG | + | CUGGGGCCUGUCGUGGGGUG | 4661 |
| CGTTTGAACCTGGGAGGCGG | 1568 | AGG | − | CGUUUGAACCUGGGAGGCGG | 4662 |
| CACTGGGGCCTGTCGTGGGG | 1569 | TGG | + | CACUGGGGCCUGUCGUGGGG | 4663 |
| AACTCCTGACCTCAAGTGAT | 1570 | CGG | + | AACUCCUGACCUCAAGUGAU | 4664 |
| CAGGCTGGTCTTGAGCTCCT | 1571 | GGG | − | CAGGCUGGUCUUGAGCUCCU | 4665 |
| CGCGCCATTGTACTCCAGCC | 1572 | TGG | + | CGCGCCAUUGUACUCCAGCC | 4666 |
| CGCTTGAACCCGGGAGATGG | 1573 | AGG | − | CGCUUGAACCCGGGAGAUGG | 4667 |
| AGAGTCTTACTCTGTCGCCC | 1574 | AGG | + | AGAGUCUUACUCUGUCGCCC | 4668 |
| AAGAGGCTGAGGCAGGAGAA | 1575 | TGG | + | AAGAGGCUGAGGCAGGAGAA | 4669 |
| AAAAAACACAAAAATTAGCT | 1576 | GGG | − | AAAAAACACAAAAAUUAGCU | 4670 |
| ACTGGGGCCTGTCGTGGGGT | 1577 | GGG | + | ACUGGGGCCUGUCGUGGGGU | 4671 |
| GCACTTTGGGAGGACAAGGC | 1578 | AGG | + | GCACUUUGGGAGGACAAGGC | 4672 |
| GCCTTGGCCTCCTGAAGTGC | 1579 | TGG | − | GCCUUGGCCUCCUGAAGUGC | 4673 |
| GCCTTGTCCTCCCAAAGTGC | 1580 | TGG | − | GCCUUGUCCUCCCAAAGUGC | 4674 |
| AGCACTTTGGGAGGGCGAGG | 1581 | TGG | + | AGCACUUUGGGAGGGCGAGG | 4675 |
| ACACACTGGGGCCTGTCGTG | 1582 | GGG | + | ACACACUGGGGCCUGUCGUG | 4676 |
| TGGCTGTAATCCCAGCTACT | 1583 | CGG | + | UGGCUGUAAUCCCAGCUACU | 4677 |
| CAGGAGAATCACTTGAAACC | 1584 | CGG | − | CAGGAGAAUCACUUGAAACC | 4678 |
| TGCCTGTCATCCCAGCTACT | 1585 | AGG | − | UGCCUGUCAUCCCAGCUACU | 4679 |
| CACACACTGGGGCCTGTCGT | 1586 | GGG | + | CACACACUGGGGCCUGUCGU | 4680 |
| CAGGTGGATCACCTAAGGTC | 1587 | AGG | + | CAGGUGGAUCACCUAAGGUC | 4681 |
| TGTTGTTGTTGTTTTTGAGA | 1588 | TGG | + | UGUUGUUGUUGUUUUUGAGA | 4682 |
| TGCCTCTAATCCCAGCTACT | 1589 | CGG | + | UGCCUCUAAUCCCAGCUACU | 4683 |
| GGAGTGCAGTGGAGCGATCT | 1590 | TGG | + | GGAGUGCAGUGGAGCGAUCU | 4684 |
| CCCAGCACTTCAGGAGGCCA | 1591 | AGG | + | CCCAGCACUUCAGGAGGCCA | 4685 |
| GGCTGTAATCCCAGCTACTC | 1592 | GGG | + | GGCUGUAAUCCCAGCUACUC | 4686 |
| TGCTTGAGCCCAGGAGGTCG | 1593 | AGG | + | UGCUUGAGCCCAGGAGGUCG | 4687 |
| TTTGTATTTTTGTAGAGACG | 1594 | GGG | − | UUUGUAUUUUUGUAGAGACG | 4688 |
| GGAGTCTTACTCTGTTGCCC | 1595 | AGG | + | GGAGUCUUACUCUGUUGCCC | 4689 |
| CCTTGGCCTCCTGAAGTGCT | 1596 | GGG | − | CCUUGGCCUCCUGAAGUGCU | 4690 |
| CAGGAGCTCAAGACCAGCCT | 1597 | GGG | + | CAGGAGCUCAAGACCAGCCU | 4691 |
| CCAGGCTGGTCTTGAGCTCC | 1598 | TGG | − | CCAGGCUGGUCUUGAGCUCC | 4692 |
| CCAGGAGCTCAAGACCAGCC | 1599 | TGG | + | CCAGGAGCUCAAGACCAGCC | 4693 |
| GAATTTCACTCTTGTTGCCC | 1600 | AGG | + | GAAUUUCACUCUUGUUGCCC | 4694 |
| CGATAGTTTGCTCAGAATGA | 1601 | TGG | − | CGAUAGUUUGCUCAGAAUGA | 4695 |
| CCCAGCACTTTGGGAGGACA | 1602 | AGG | + | CCCAGCACUUUGGGAGGACA | 4696 |
| ATTCTGAGCAAACTATCGCA | 1603 | AGG | + | AUUCUGAGCAAACUAUCGCA | 4697 |
| CTAAAGATACAAAAATTAGC | 1604 | CGG | − | CUAAAGAUACAAAAAUUAGC | 4698 |
| CCTTGTCCTCCCAAAGTGCT | 1605 | GGG | − | CCUUGUCCUCCCAAAGUGCU | 4699 |
| CGCTCCACTGCACTCCAGCC | 1606 | TGG | − | CGCUCCACUGCACUCCAGCC | 4700 |
| GCGCCATTGTACTCCAGCCT | 1607 | GGG | + | GCGCCAUUGUACUCCAGCCU | 4701 |
| ATCTCAAAAAAAAAAAAAAA | 1608 | AGG | + | AUCUCAAAAAAAAAAAAAAA | 4702 |
| GAGCGGGGAGGGATAGCATT | 1609 | AGG | + | GAGCGGGGAGGGAUAGCAUU | 4703 |
| TCAAGCGATTCTCCTGCCTC | 1610 | AGG | + | UCAAGCGAUUCUCCUGCCUC | 4704 |
| TTAATCCAGTCTATCACTGA | 1611 | TGG | − | UUAAUCCAGUCUAUCACUGA | 4705 |
| GAGAATCGCTTGAACCCGGA | 1612 | AGG | + | GAGAAUCGCUUGAACCCGGA | 4706 |
| GCCTCTAATCCCAGCTACTC | 1613 | GGG | + | GCCUCUAAUCCCAGCUACUC | 4707 |
| TTGTAATTTTAGTAGAGACG | 1614 | GGG | + | UUGUAAUUUUAGUAGAGACG | 4708 |
| AATCGCTTGAACCCGGGAGA | 1615 | TGG | − | AAUCGCUUGAACCCGGGAGA | 4709 |
| TTTTGCTATGTTGGCCAGGC | 1616 | TGG | − | UUUUGCUAUGUUGGCCAGGC | 4710 |
| TAAAAATACAAACATTAGCC | 1617 | AGG | + | UAAAAAUACAAACAUUAGCC | 4711 |
| TCACACACTGGGGCCTGTCG | 1618 | TGG | + | UCACACACUGGGGCCUGUCG | 4712 |
| CCATGTTGGTCAGGCTGGTC | 1619 | TGG | − | CCAUGUUGGUCAGGCUGGUC | 4713 |
| CCAGACCAGCCTGACCAACA | 1620 | TGG | + | CCAGACCAGCCUGACCAACA | 4714 |
| TGACTGTAATCCCAGCACTT | 1621 | TGG | + | UGACUGUAAUCCCAGCACUU | 4715 |
| CAGGCTGGTCTCAAATTCCT | 1622 | GGG | − | CAGGCUGGUCUCAAAUUCCU | 4716 |
| TGGGAGGATCCCTTGAGCCC | 1623 | AGG | + | UGGGAGGAUCCCUUGAGCCC | 4717 |
| TGCACCACTGCACTCCAGTC | 1624 | TGG | − | UGCACCACUGCACUCCAGUC | 4718 |
| TCTTACTCTGTCGCCCAGGC | 1625 | TGG | + | UCUUACUCUGUCGCCCAGGC | 4719 |
| TCTCACTCTGTTGCCCAGAC | 1626 | TGG | + | UCUCACUCUGUUGCCCAGAC | 4720 |
| AACTGCTTGAACCCAGGAGG | 1627 | CGG | + | AACUGCUUGAACCCAGGAGG | 4721 |
| ACACAAAAATTAGCTGGGCA | 1628 | TGG | − | ACACAAAAAUUAGCUGGGCA | 4722 |
| GGATTACAGGCGTGAGCCAC | 1629 | GGG | + | GGAUUACAGGCGUGAGCCAC | 4723 |
| GCCGAGGTGGGCGGATCATG | 1630 | AGG | + | GCCGAGGUGGGCGGAUCAUG | 4724 |
| CAGAAGTTTGAGACCAGCCT | 1631 | GGG | − | CAGAAGUUUGAGACCAGCCU | 4725 |
| GAGGTCTCACTATGTTGCCC | 1632 | AGG | − | GAGGUCUCACUAUGUUGCCC | 4726 |
| TTTTGTATTTTTGTAGAGAC | 1633 | GGG | − | UUUUGUAUUUUUGUAGAGAC | 4727 |
| TCGGGAGTTCGAGACCAGCC | 1634 | TGG | − | UCGGGAGUUCGAGACCAGCC | 4728 |
| TGCCTGTAACCCCAGCACTT | 1635 | TGG | + | UGCCUGUAACCCCAGCACUU | 4729 |
| TTTGTAATTTTAGTAGAGAC | 1636 | GGG | + | UUUGUAAUUUUAGUAGAGAC | 4730 |
| GCTCCACTGCACTCCAGCCT | 1637 | GGG | − | GCUCCACUGCACUCCAGCCU | 4731 |
| GCAGGCAGATCACCTGAGGT | 1638 | CGG | − | GCAGGCAGAUCACCUGAGGU | 4732 |
| TCCTGAGTAACTGGGATTAC | 1639 | CGG | − | UCCUGAGUAACUGGGAUUAC | 4733 |
| CTTGGCCTCCCAAAGTGCTG | 1640 | GGG | − | CUUGGCCUCCCAAAGUGCUG | 4734 |
| CAGGTGTGTGCCACCACACC | 1641 | TGG | + | CAGGUGUGUGCCACCACACC | 4735 |
| CCAGGCTGGTCTCAAATTCC | 1642 | TGG | − | CCAGGCUGGUCUCAAAUUCC | 4736 |
| CCAGGAATTTGAGACCAGCC | 1643 | TGG | + | CCAGGAAUUUGAGACCAGCC | 4737 |
| TTTTTGTATTTTTGTAGAGA | 1644 | CGG | − | UUUUUGUAUUUUUGUAGAGA | 4738 |
| TGTAATCCCAGCACTTCAGG | 1645 | AGG | + | UGUAAUCCCAGCACUUCAGG | 4739 |
| GAGAACTGCTTGAACCCAGG | 1646 | AGG | + | GAGAACUGCUUGAACCCAGG | 4740 |
| CAGGAATTTGAGACCAGCCT | 1647 | GGG | + | CAGGAAUUUGAGACCAGCCU | 4741 |
| TCAGAAGTTTGAGACCAGCC | 1648 | TGG | − | UCAGAAGUUUGAGACCAGCC | 4742 |
| GACTGTAATCCCAGCACTTT | 1649 | GGG | + | GACUGUAAUCCCAGCACUUU | 4743 |
| GCACCACTGCACTCCAGTCT | 1650 | GGG | − | GCACCACUGCACUCCAGUCU | 4744 |
| TAAAAATTAGCCAGGTGTGG | 1651 | TGG | − | UAAAAAUUAGCCAGGUGUGG | 4745 |
| TTTTGTAATTTTAGTAGAGA | 1652 | CGG | + | UUUUGUAAUUUUAGUAGAGA | 4746 |
| TAAAAATACAAAAATCAGCT | 1653 | GGG | − | UAAAAAUACAAAAAUCAGCU | 4747 |
| GCCTCGGTCTCCCAAAGTGC | 1654 | TGG | + | GCCUCGGUCUCCCAAAGUGC | 4748 |
| GCACTTTGGGAGACCGAGGC | 1655 | GGG | − | GCACUUUGGGAGACCGAGGC | 4749 |
| AGCACTTTGGGAGACCGAGG | 1656 | CGG | − | AGCACUUUGGGAGACCGAGG | 4750 |
| ACCTCATGATCCGCCCACCT | 1657 | CGG | − | ACCUCAUGAUCCGCCCACCU | 4751 |
| CACTGCAACCTCTGCCTTCC | 1658 | GGG | − | CACUGCAACCUCUGCCUUCC | 4752 |
| TCTTACTCTGTTGCCCAGGC | 1659 | TGG | + | UCUUACUCUGUUGCCCAGGC | 4753 |
| CACTGCAGCCTCGACCTCCT | 1660 | GGG | − | CACUGCAGCCUCGACCUCCU | 4754 |
| AAAAAAAAAAAAAAAAAGCC | 1661 | AGG | + | AAAAAAAAAAAAAAAAAGCC | 4755 |
| GGGGTTTCTCCATGTTGGCC | 1662 | AGG | + | GGGGUUUCUCCAUGUUGGCC | 4756 |
| CAGGAGAACTGCTTGAACCC | 1663 | AGG | + | CAGGAGAACUGCUUGAACCC | 4757 |
| GGTGGGCGGATCATGAGGTC | 1664 | AGG | + | GGUGGGCGGAUCAUGAGGUC | 4758 |
| TTGCCCAGGCTGGAGTACAA | 1665 | TGG | − | UUGCCCAGGCUGGAGUACAA | 4759 |
| TCACTGCAGCCTCGACCTCC | 1666 | TGG | − | UCACUGCAGCCUCGACCUCC | 4760 |
| TCACTGCAACCTCTGCCTTC | 1667 | CGG | − | UCACUGCAACCUCUGCCUUC | 4761 |
| GGGATTACAGGCGTGAGCCA | 1668 | CGG | + | GGGAUUACAGGCGUGAGCCA | 4762 |
| GCCTGTAGTCCCAGCTACTA | 1669 | GGG | − | GCCUGUAGUCCCAGCUACUA | 4763 |
| CTAAAAATACAAAAATCAGC | 1670 | TGG | − | CUAAAAAUACAAAAAUCAGC | 4764 |
| CAGGCGCCCGCCACCACACC | 1671 | CGG | − | CAGGCGCCCGCCACCACACC | 4765 |
| CCCAGCACTTTGGGAGACCG | 1672 | AGG | − | CCCAGCACUUUGGGAGACCG | 4766 |
| TTGCCCAGACTGGAGTGCAG | 1673 | TGG | + | UUGCCCAGACUGGAGUGCAG | 4767 |
| CAAAAAAAAAAAAAAAAAAA | 1674 | AGG | + | CAAAAAAAAAAAAAAAAAAA | 4768 |
| ACACTTTGGGAGGCTGAGGT | 1675 | GGG | − | ACACUUUGGGAGGCUGAGGU | 4769 |
| CCTCGGTCTCCCAAAGTGCT | 1676 | GGG | + | CCUCGGUCUCCCAAAGUGCU | 4770 |
| TCACTGCAGCCTTGAACTCC | 1677 | AGG | − | UCACUGCAGCCUUGAACUCC | 4771 |
| AAAAAAAAAAAAAAAAAAGA | 1678 | GGG | − | AAAAAAAAAAAAAAAAAAGA | 4772 |
| GCCTGTAACCCCAGCACTTT | 1679 | GGG | + | GCCUGUAACCCCAGCACUUU | 4773 |
| ATTATTATACTTTAAGTTCT | 1680 | AGG | − | AUUAUUAUACUUUAAGUUCU | 4774 |
| TTGTATTTTTAGTAGAGACT | 1681 | GGG | − | UUGUAUUUUUAGUAGAGACU | 4775 |
| TCGCCCAGGCTGGAGTACAG | 1682 | TGG | − | UCGCCCAGGCUGGAGUACAG | 4776 |
| CGAGGCAGGCAGATCACCTG | 1683 | AGG | − | CGAGGCAGGCAGAUCACCUG | 4777 |
| CGAGGCAGGCAGATCACCTG | 1684 | AGG | − | CGAGGCAGGCAGAUCACCUG | 4778 |
| TCCCTAGTAGCTGGGACTAC | 1685 | AGG | + | UCCCUAGUAGCUGGGACUAC | 4779 |
| TTTCTCCATGTTGGCCAGGC | 1686 | TGG | + | UUUCUCCAUGUUGGCCAGGC | 4780 |
| AATACAAAATTAGCCAGGCA | 1687 | TGG | + | AAUACAAAAUUAGCCAGGCA | 4781 |
| TGTAGTCCCAGCTACTAGGG | 1688 | AGG | − | UGUAGUCCCAGCUACUAGGG | 4782 |
| GGAGTGCAATGGCGCAATCT | 1689 | CGG | − | GGAGUGCAAUGGCGCAAUCU | 4783 |
| ACAAAATTAGCCAGGCATGG | 1690 | TGG | + | ACAAAAUUAGCCAGGCAUGG | 4784 |
| AATGGTGTGAACCCGGGAGG | 1691 | CGG | + | AAUGGUGUGAACCCGGGAGG | 4785 |
| TTCTCCTGCCTCAGCCTCCC | 1692 | AGG | + | UUCUCCUGCCUCAGCCUCCC | 4786 |
| TCAGGAGTTCCAGACCAGCC | 1693 | TGG | − | UCAGGAGUUCCAGACCAGCC | 4787 |
| TCCCAAAGTGCTGGGGTTAC | 1694 | AGG | − | UCCCAAAGUGCUGGGGUUAC | 4788 |
| TGTAACCCCAGCACTTTGGG | 1695 | AGG | + | UGUAACCCCAGCACUUUGGG | 4789 |
| AAAAAAAAAAAAAAAAAAAG | 1696 | AGG | − | AAAAAAAAAAAAAAAAAAAG | 4790 |
| TACAAAAAATTAGCCGGGTG | 1697 | TGG | + | UACAAAAAAUUAGCCGGGUG | 4791 |
| CAGGTGTGAGCCACCACACC | 1698 | CGG | − | CAGGUGUGAGCCACCACACC | 4792 |
| AACACTTTGGGAGGCTGAGG | 1699 | TGG | − | AACACUUUGGGAGGCUGAGG | 4793 |
| GGTCTCGAACTCCCGACCTC | 1700 | AGG | + | GGUCUCGAACUCCCGACCUC | 4794 |
| TACAAAAAATTAGCCAGGTG | 1701 | TGG | + | UACAAAAAAUUAGCCAGGUG | 4795 |
| CAGGCATGAGCCACCGCACC | 1702 | TGG | + | CAGGCAUGAGCCACCGCACC | 4796 |
| TGCGCCATTGCACTCCAGCC | 1703 | TGG | + | UGCGCCAUUGCACUCCAGCC | 4797 |
| TTATTATACTTTAAGTTCTA | 1704 | GGG | − | UUAUUAUACUUUAAGUUCUA | 4798 |
| GAGAATGGTGTGAACCCGGG | 1705 | AGG | + | GAGAAUGGUGUGAACCCGGG | 4799 |
| AATTAGCCGGGTGTGGTGGC | 1706 | GGG | + | AAUUAGCCGGGUGUGGUGGC | 4800 |
| CACCGCATGTTCTCACTCAT | 1707 | AGG | + | CACCGCAUGUUCUCACUCAU | 4801 |
| CAAGGCAGGTGGATCACCTG | 1708 | AGG | + | CAAGGCAGGUGGAUCACCUG | 4802 |
| CGCATGTTCTCACTCATAGG | 1709 | TGG | + | CGCAUGUUCUCACUCAUAGG | 4803 |
| AAATTAGCCGGGTGTGGTGG | 1710 | CGG | + | AAAUUAGCCGGGUGUGGUGG | 4804 |
| CGCCTGTAATCTCAGCACTT | 1711 | TGG | + | CGCCUGUAAUCUCAGCACUU | 4805 |
| CTCAGGTGATCTGCCTGCCT | 1712 | CGG | + | CUCAGGUGAUCUGCCUGCCU | 4806 |
| CTCAGGTGATCTGCCTGCCT | 1713 | CGG | + | CUCAGGUGAUCUGCCUGCCU | 4807 |
| GCTACTAGGGAGGCTGAGGC | 1714 | AGG | − | GCUACUAGGGAGGCUGAGGC | 4808 |
| TGCTTGAACCCAGGAGGCGG | 1715 | AGG | + | UGCUUGAACCCAGGAGGCGG | 4809 |
| GCCTCAGCCTCCCTAGTAGC | 1716 | TGG | + | GCCUCAGCCUCCCUAGUAGC | 4810 |
| GAGACGGGGTTTCTCCATGT | 1717 | TGG | + | GAGACGGGGUUUCUCCAUGU | 4811 |
| GAGTGAGAACATGCGGTGTT | 1718 | TGG | − | GAGUGAGAACAUGCGGUGUU | 4812 |
| GGTACATGTGCACAACGTGC | 1719 | AGG | − | GGUACAUGUGCACAACGUGC | 4813 |
| AAAAAATTAGCCGGGTGTGG | 1720 | TGG | + | AAAAAAUUAGCCGGGUGUGG | 4814 |
| CCTAGCACTTTGGGAGGCCG | 1721 | AGG | + | CCUAGCACUUUGGGAGGCCG | 4815 |
| CAGGCGTGAGCCACTGTGCC | 1722 | TGG | − | CAGGCGUGAGCCACUGUGCC | 4816 |
| CCCAGCTACTAGGGAGGCTG | 1723 | AGG | − | CCCAGCUACUAGGGAGGCUG | 4817 |
| CCCAGCTACTAGGGAGGCTG | 1724 | AGG | − | CCCAGCUACUAGGGAGGCUG | 4818 |
| CGCCTGTAATCCTAGCACTT | 1725 | TGG | + | CGCCUGUAAUCCUAGCACUU | 4819 |
| TGTAGGGACATGGATGAAGC | 1726 | TGG | + | UGUAGGGACAUGGAUGAAGC | 4820 |
| CCTCAGCCTCCCTAGTAGCT | 1727 | GGG | + | CCUCAGCCUCCCUAGUAGCU | 4821 |
| CCTCAGCCTCCCTAGTAGCT | 1728 | GGG | + | CCUCAGCCUCCCUAGUAGCU | 4822 |
| TGCCTGTAATCCTAGCACTT | 1729 | TGG | − | UGCCUGUAAUCCUAGCACUU | 4823 |
| CAGGCAGATCACCTGAGGTC | 1730 | AGG | − | CAGGCAGAUCACCUGAGGUC | 4824 |
| CAGGCAGATCACCTGAGGTC | 1731 | GGG | − | CAGGCAGAUCACCUGAGGUC | 4825 |
| GCATGTTCTCACTCATAGGT | 1732 | GGG | + | GCAUGUUCUCACUCAUAGGU | 4826 |
| CACCTATGAGTGAGAACATG | 1733 | CGG | − | CACCUAUGAGUGAGAACAUG | 4827 |
| GCAGGAGAATGGTGTGAACC | 1734 | CGG | + | GCAGGAGAAUGGUGUGAACC | 4828 |
| CAGGCATGAGCCACCATGCC | 1735 | CGG | − | CAGGCAUGAGCCACCAUGCC | 4829 |
| CAGGAGAATGGTGTGAACCC | 1736 | GGG | + | CAGGAGAAUGGUGUGAACCC | 4830 |
| CATGCCATTGCACTCCAGCC | 1737 | TGG | + | CAUGCCAUUGCACUCCAGCC | 4831 |
| TCTCACTATGTTGCCCAGGC | 1738 | TGG | − | UCUCACUAUGUUGCCCAGGC | 4832 |
| ATGCCATTGCACTCCAGCCT | 1739 | GGG | + | AUGCCAUUGCACUCCAGCCU | 4833 |
| AAAAAATTAGCCAGGTGTGG | 1740 | TGG | + | AAAAAAUUAGCCAGGUGUGG | 4834 |
| TATGTATACATGTGCCATGT | 1741 | TGG | − | UAUGUAUACAUGUGCCAUGU | 4835 |
| GGGGTTTCACTGTGTTAGCC | 1742 | AGG | − | GGGGUUUCACUGUGUUAGCC | 4836 |
| GAGTTTCACTCTTGTTGCCC | 1743 | AGG | − | GAGUUUCACUCUUGUUGCCC | 4837 |
| CTCAGGTGATCCACCTGCCT | 1744 | TGG | − | CUCAGGUGAUCCACCUGCCU | 4838 |
| TTCACTCTTGTTGCCCAGGC | 1745 | TGG | + | UUCACUCUUGUUGCCCAGGC | 4839 |
| TTCACTCTTGTTGCCCAGGC | 1746 | TGG | − | UUCACUCUUGUUGCCCAGGC | 4840 |
| GCCTGTAATCTCAGCACTTT | 1747 | GGG | + | GCCUGUAAUCUCAGCACUUU | 4841 |
| GCGCCATTGCACTCCAGCCT | 1748 | GGG | + | GCGCCAUUGCACUCCAGCCU | 4842 |
| GGGGTTTCACCATGTTGGTC | 1749 | AGG | − | GGGGUUUCACCAUGUUGGUC | 4843 |
| ACCTCAGCCTCCTGAGTAGC | 1750 | TGG | − | ACCUCAGCCUCCUGAGUAGC | 4844 |
| AGCTACTCAGGAGGCTGAGG | 1751 | CGG | − | AGCUACUCAGGAGGCUGAGG | 4845 |
| AGCTACTCAGGAGGCTGAGG | 1752 | TGG | + | AGCUACUCAGGAGGCUGAGG | 4846 |
| GCTACTCAGGAGGCTGAGGT | 1753 | GGG | + | GCUACUCAGGAGGCUGAGGU | 4847 |
| TTTTTTTTTTTTTTTGAGAC | 1754 | AGG | + | UUUUUUUUUUUUUUUGAGAC | 4848 |
| TTTTTTTTTTTTTTTGAGAC | 1755 | AGG | − | UUUUUUUUUUUUUUUGAGAC | 4849 |
| TTTTTTTTTTTTTTGAGACA | 1756 | GGG | + | UUUUUUUUUUUUUUGAGACA | 4850 |
| TTTTTTTTTTTTTTGAGACA | 1757 | GGG | − | UUUUUUUUUUUUUUGAGACA | 4851 |
| TTTCACTGTGTTAGCCAGGA | 1758 | TGG | − | UUUCACUGUGUUAGCCAGGA | 4852 |
| TCACCCAGGCTGGAGTGCAA | 1759 | TGG | − | UCACCCAGGCUGGAGUGCAA | 4853 |
| ACCTGTAATCCCAGCTACTT | 1760 | GGG | + | ACCUGUAAUCCCAGCUACUU | 4854 |
| CTAAAAATACAAAATTAGCC | 1761 | AGG | + | CUAAAAAUACAAAAUUAGCC | 4855 |
| GCCTGTAATCCTAGCACTTT | 1762 | GGG | − | GCCUGUAAUCCUAGCACUUU | 4856 |
| GCCTGTAATCCTAGCACTTT | 1763 | GGG | + | GCCUGUAAUCCUAGCACUUU | 4857 |
| GGAGTGCAGTGGCGTGATCT | 1764 | TGG | + | GGAGUGCAGUGGCGUGAUCU | 4858 |
| GGAGTGCAGTGGCGTGATCT | 1765 | CGG | + | GGAGUGCAGUGGCGUGAUCU | 4859 |
| TCCCAAAGTGCTGAGATTAC | 1766 | AGG | − | UCCCAAAGUGCUGAGAUUAC | 4860 |
| TGTAATCTCAGCACTTTGGG | 1767 | AGG | + | UGUAAUCUCAGCACUUUGGG | 4861 |
| TAGACTGGATTAAGAAAATG | 1768 | TGG | + | UAGACUGGAUUAAGAAAAUG | 4862 |
| TTTCACCATGTTGGTCAGGC | 1769 | TGG | − | UUUCACCAUGUUGGUCAGGC | 4863 |
| CACTGCAACCTCCGCCTCCT | 1770 | GGG | − | CACUGCAACCUCCGCCUCCU | 4864 |
| GGAGTCTCGCTCTGTCGCCC | 1771 | AGG | − | GGAGUCUCGCUCUGUCGCCC | 4865 |
| AATGTGGCACATATACACCA | 1772 | TGG | + | AAUGUGGCACAUAUACACCA | 4866 |
| ACGCCACTGCACTCCAGCCT | 1773 | GGG | − | ACGCCACUGCACUCCAGCCU | 4867 |
| TCCCAAAGTGCTAGGATTAC | 1774 | AGG | + | UCCCAAAGUGCUAGGAUUAC | 4868 |
| TCCCAAAGTGCTAGGATTAC | 1775 | AGG | − | UCCCAAAGUGCUAGGAUUAC | 4869 |
| GGAGTGCAGTGGCGCGATCT | 1776 | TGG | − | GGAGUGCAGUGGCGCGAUCU | 4870 |
| CACGCCACTGCACTCCAGCC | 1777 | TGG | − | CACGCCACUGCACUCCAGCC | 4871 |
| TGTAATCCTAGCACTTTGGG | 1778 | AGG | + | UGUAAUCCUAGCACUUUGGG | 4872 |
| CAAAAATTAGCTGGGCATGG | 1779 | TGG | − | CAAAAAUUAGCUGGGCAUGG | 4873 |
| CTTTGGGAGGCTGAGGTGGG | 1780 | AGG | − | CUUUGGGAGGCUGAGGUGGG | 4874 |
| GGTCTCAAACTCCTGACCTC | 1781 | AGG | − | GGUCUCAAACUCCUGACCUC | 4875 |
| GAGAATCGCTTGAACCCAGG | 1782 | AGG | + | GAGAAUCGCUUGAACCCAGG | 4876 |
| CAGGCGTGAGCCACCGCGCC | 1783 | CGG | + | CAGGCGUGAGCCACCGCGCC | 4877 |
| CTTTGGGAGGCCAAGGCAGG | 1784 | TGG | + | CUUUGGGAGGCCAAGGCAGG | 4878 |
| GGTCTTGAACTCCTGACCTC | 1785 | AGG | + | GGUCUUGAACUCCUGACCUC | 4879 |
| TCTCGCTCTGTCGCCCAGGC | 1786 | TGG | − | UCUCGCUCUGUCGCCCAGGC | 4880 |
| CTTTGGGAGGCCGAGGTGGG | 1787 | CGG | + | CUUUGGGAGGCCGAGGUGGG | 4881 |
| CACCTGTAATCCCAGCTACT | 1788 | TGG | + | CACCUGUAAUCCCAGCUACU | 4882 |
| CGCGCCACTGCACTCCAGCC | 1789 | TGG | + | CGCGCCACUGCACUCCAGCC | 4883 |
| ACCTGTAGTCCCAGCTACTC | 1790 | AGG | − | ACCUGUAGUCCCAGCUACUC | 4884 |
| AGGGTTTCACCATGTTGGCC | 1791 | AGG | + | AGGGUUUCACCAUGUUGGCC | 4885 |
| CACTGCAAGCTCCGCCTCCC | 1792 | GGG | − | CACUGCAAGCUCCGCCUCCC | 4886 |
| TGCCTGTAGTCCCAGCTACT | 1793 | AGG | − | UGCCUGUAGUCCCAGCUACU | 4887 |
| GGTCTCGAACTCCTGACCTC | 1794 | AGG | − | GGUCUCGAACUCCUGACCUC | 4888 |
| TCACTGCAAGCTCCGCCTCC | 1795 | CGG | − | UCACUGCAAGCUCCGCCUCC | 4889 |
| CACTGCAAGCTCCGCCTCCC | 1796 | AGG | + | CACUGCAACCUCCGCCUCCC | 4890 |
| GCACTTTGGGAGGCCGAGGT | 1797 | GGG | + | GCACUUUGGGAGGCCGAGGU | 4891 |
| TCACTGCAAGCTCCGCCTCC | 1798 | TGG | − | UCACUGCAACCUCCGCCUCC | 4892 |
| CAAGACCAGCCTGGCCAACA | 1799 | TGG | − | CAAGACCAGCCUGGCCAACA | 4893 |
| GAGATGGGGTTTCACCATGT | 1800 | TGG | − | GAGAUGGGGUUUCACCAUGU | 4894 |
| TGTAGTCCCAGCTACTCAGG | 1801 | AGG | + | UGUAGUCCCAGCUACUCAGG | 4895 |
| TGTAGTCCCAGCTACTCAGG | 1802 | AGG | − | UGUAGUCCCAGCUACUCAGG | 4896 |
| TCCTGAGTAGCTGGGACTAC | 1803 | AGG | + | UCCUGAGUAGCUGGGACUAC | 4897 |
| TCCTGAGTAGCTGGGACTAC | 1804 | AGG | − | UCCUGAGUAGCUGGGACUAC | 4898 |
| CAGGAGAATCGCTTGAACCC | 1805 | AGG | + | CAGGAGAAUCGCUUGAACCC | 4899 |
| CAGGAGAATCGCTTGAACCC | 1806 | GGG | − | CAGGAGAAUCGCUUGAACCC | 4900 |
| CGAGACCAGCCTGGCCAACA | 1807 | TGG | − | CGAGACCAGCCUGGCCAACA | 4901 |
| GCAGGAGAATCGCTTGAACC | 1808 | CGG | + | GCAGGAGAAUCGCUUGAACC | 4902 |
| GCAGGAGAATCGCTTGAACC | 1809 | CGG | − | GCAGGAGAAUCGCUUGAACC | 4903 |
| TGTAATCCCAGCTACTCGGG | 1810 | AGG | + | UGUAAUCCCAGCUACUCGGG | 4904 |
| TAAAAATACAAAAAATTAGC | 1811 | CGG | + | UAAAAAUACAAAAAAUUAGC | 4905 |
| GCGCCACTGCACTCCAGCCT | 1812 | GGG | + | GCGCCACUGCACUCCAGCCU | 4906 |
| TCCCAAGTAGCTGGGATTAC | 1813 | AGG | − | UCCCAAGUAGCUGGGAUUAC | 4907 |
| TGTAATCCCAGCTACTTGGG | 1814 | AGG | + | UGUAAUCCCAGCUACUUGGG | 4908 |
| TCAGGAGTTCAAGACCAGCC | 1815 | TGG | − | UCAGGAGUUCAAGACCAGCC | 4909 |
| TCAGGAGTTCGAGACCAGCC | 1816 | TGG | + | UCAGGAGUUCGAGACCAGCC | 4910 |
| TCAGGAGTTCGAGACCAGCC | 1817 | TGG | − | UCAGGAGUUCGAGACCAGCC | 4911 |
| AAAAATACAAAAAATTAGCC | 1818 | AGG | + | AAAAAUACAAAAAAUUAGCC | 4912 |
| AAAAATACAAAAAATTAGCC | 1819 | GGG | + | AAAAAUACAAAAAAUUAGCC | 4913 |
| TCAGGAGATCGAGACCATCC | 1820 | TGG | + | UCAGGAGAUCGAGACCAUCC | 4914 |
| GCCTTGGCCTCCCAAAGTGC | 1821 | TGG | − | GCCUUGGCCUCCCAAAGUGC | 4915 |
| GCCTTGGCCTCCCAAAGTGC | 1822 | TGG | − | GCCUUGGCCUCCCAAAGUGC | 4916 |
| GCACTTTGGGAGGCCAAGGC | 1823 | AGG | + | GCACUUUGGGAGGCCAAGGC | 4917 |
| GCACTTTGGGAGGCCAAGGC | 1824 | AGG | + | GCACUUUGGGAGGCCAAGGC | 4918 |
| GCCTCAGCCTCCCAAAGTGC | 1825 | TGG | − | GCCUCAGCCUCCCAAAGUGC | 4919 |
| GCACTTTGGGAGGCTGAGGC | 1826 | GGG | + | GCACUUUGGGAGGCUGAGGC | 4920 |
| AGCACTTTGGGAGGCTGAGG | 1827 | CGG | + | AGCACUUUGGGAGGCUGAGG | 4921 |
| TCGCCCAGGCTGGAGTGCAG | 1828 | TGG | − | UCGCCCAGGCUGGAGUGCAG | 4922 |
| TCGCCCAGGCTGGAGTGCAG | 1829 | TGG | + | UCGCCCAGGCUGGAGUGCAG | 4923 |
| TTGTATTTTTAGTAGAGACA | 1830 | GGG | + | UUGUAUUUUUAGUAGAGACA | 4924 |
| TTGTATTTTTAGTAGAGACA | 1831 | GGG | − | UUGUAUUUUUAGUAGAGACA | 4925 |
| TTGCCCAGGCTGGAGTGCAG | 1832 | TGG | + | UUGCCCAGGCUGGAGUGCAG | 4926 |
| CACCTGTAATCCCAGCACTT | 1833 | TGG | + | CACCUGUAAUCCCAGCACUU | 4927 |
| GCCTGTAGTCCCAGCTACTC | 1834 | AGG | + | GCCUGUAGUCCCAGCUACUC | 4928 |
| ACCTGTAATCCCAGCACTTT | 1835 | GGG | + | ACCUGUAAUCCCAGCACUUU | 4929 |
| GCTACTTGGGAGGCTGAGGC | 1836 | AGG | + | GCUACUUGGGAGGCUGAGGC | 4930 |
| GCTACTCAGGAGGCTGAGGC | 1837 | GGG | − | GCUACUCAGGAGGCUGAGGC | 4931 |
| CCCAGCACTTTGGGAGGCCA | 1838 | AGG | + | CCCAGCACUUUGGGAGGCCA | 4932 |
| CCCAGCACTTTGGGAGGCCA | 1839 | AGG | + | CCCAGCACUUUGGGAGGCCA | 4933 |
| GCCTCAGCCTCCCAAGTAGC | 1840 | TGG | − | GCCUCAGCCUCCCAAGUAGC | 4934 |
| GCCTCGGCCTCCCAAAGTGC | 1841 | TGG | + | GCCUCGGCCUCCCAAAGUGC | 4935 |
| GCCTCGGCCTCCCAAAGTGC | 1842 | TGG | + | GCCUCGGCCUCCCAAAGUGC | 4936 |
| TTGTATTTTTAGTAGAGATG | 1843 | GGG | − | UUGUAUUUUUAGUAGAGAUG | 4937 |
| TTTTTTTTTTTTTTTTGAGA | 1844 | TGG | − | UUUUUUUUUUUUUUUUGAGA | 4938 |
| TTTTTTTTTTTTTTTTGAGA | 1845 | CGG | − | UUUUUUUUUUUUUUUUGAGA | 4939 |
| CCTTGGCCTCCCAAAGTGCT | 1846 | GGG | − | CCUUGGCCUCCCAAAGUGCU | 4940 |
| CCTTGGCCTCCCAAAGTGCT | 1847 | GGG | − | CCUUGGCCUCCCAAAGUGCU | 4941 |
| CCCAGCACTTTGGGAGGCTG | 1848 | AGG | + | CCCAGCACUUUGGGAGGCUG | 4942 |
| GCACTTTGGGAGGCCGAGGC | 1849 | AGG | − | GCACUUUGGGAGGCCGAGGC | 4943 |
| GCACTTTGGGAGGCCGAGGC | 1850 | AGG | − | GCACUUUGGGAGGCCGAGGC | 4944 |
| GCCTCAGCCTCCTGAGTAGC | 1851 | TGG | + | GCCUCAGCCUCCUGAGUAGC | 4945 |
| TTTGTATTTTTAGTAGAGAT | 1852 | GGG | − | UUUGUAUUUUUAGUAGAGAU | 4946 |
| TTTCACCATGTTGGCCAGGC | 1853 | TGG | + | UUUCACCAUGUUGGCCAGGC | 4947 |
| GCTACTCGGGAGGCTGAGGC | 1854 | AGG | + | GCUACUCGGGAGGCUGAGGC | 4948 |
| AGCACTTTGGGAGGCCGAGG | 1855 | TGG | + | AGCACUUUGGGAGGCCGAGG | 4949 |
| CCCAGCTACTTGGGAGGCTG | 1856 | AGG | + | CCCAGCUACUUGGGAGGCUG | 4950 |
| TGCCTGTAATCCCAGCACTT | 1857 | TGG | − | UGCCUGUAAUCCCAGCACUU | 4951 |
| CCTCAGCCTCCCAAAGTGCT | 1858 | GGG | − | CCUCAGCCUCCCAAAGUGCU | 4952 |
| CCTCAGCCTCCCAAGTAGCT | 1859 | GGG | − | CCUCAGCCUCCCAAGUAGCU | 4953 |
| CCCAGCTACTCAGGAGGCTG | 1860 | AGG | − | CCCAGCUACUCAGGAGGCUG | 4954 |
| CCCAGCTACTCAGGAGGCTG | 1861 | AGG | + | CCCAGCUACUCAGGAGGCUG | 4955 |
| GCCTCAGCCTCCCGAGTAGC | 1862 | TGG | − | GCCUCAGCCUCCCGAGUAGC | 4956 |
| CCTCAGCCTCCTGAGTAGCT | 1863 | GGG | − | CCUCAGCCUCCUGAGUAGCU | 4957 |
| CCTCAGCCTCCTGAGTAGCT | 1864 | GGG | + | CCUCAGCCUCCUGAGUAGCU | 4958 |
| CCCAGCTACTCGGGAGGCTG | 1865 | AGG | + | CCCAGCUACUCGGGAGGCUG | 4959 |
| TTGTATTTTTAGTAGAGACG | 1866 | GGG | − | UUGUAUUUUUAGUAGAGACG | 4960 |
| CCTCAGCCTCCCGAGTAGCT | 1867 | GGG | − | CCUCAGCCUCCCGAGUAGCU | 4961 |
| CCCAGCACTTTGGGAGGCCG | 1868 | AGG | − | CCCAGCACUUUGGGAGGCCG | 4962 |
| CCCAGCACTTTGGGAGGCCG | 1869 | AGG | − | CCCAGCACUUUGGGAGGCCG | 4963 |
| CCTCGGCCTCCCAAAGTGCT | 1870 | AGG | − | CCUCGGCCUCCCAAAGUGCU | 4964 |
| CCTCGGCCTCCCAAAGTGCT | 1871 | GGG | + | CCUCGGCCUCCCAAAGUGCU | 4965 |
| CCTCGGCCTCCCAAAGTGCT | 1872 | GGG | + | CCUCGGCCUCCCAAAGUGCU | 4966 |
| CGCCTGTAATCCCAGCACTT | 1873 | TGG | + | CGCCUGUAAUCCCAGCACUU | 4967 |
| CGCCTGTAATCCCAGCACTT | 1874 | TGG | − | CGCCUGUAAUCCCAGCACUU | 4968 |
| CGCCTGTAATCCCAGCACTT | 1875 | TGG | − | CGCCUGUAAUCCCAGCACUU | 4969 |
| TTTGTATTTTTAGTAGAGAC | 1876 | AGG | + | UUUGUAUUUUUAGUAGAGAC | 4970 |
| TTTGTATTTTTAGTAGAGAC | 1877 | AGG | − | UUUGUAUUUUUAGUAGAGAC | 4971 |
| TTTGTATTTTTAGTAGAGAC | 1878 | GGG | − | UUUGUAUUUUUAGUAGAGAC | 4972 |
| TTTGTATTTTTAGTAGAGAC | 1879 | TGG | − | UUUGUAUUUUUAGUAGAGAC | 4973 |
| TTTTGTATTTTTAGTAGAGA | 1880 | TGG | − | UUUUGUAUUUUUAGUAGAGA | 4974 |
| TTTTGTATTTTTAGTAGAGA | 1881 | CGG | − | UUUUGUAUUUUUAGUAGAGA | 4975 |
| GCCTGTAATCCCAGCACTTT | 1882 | GGG | + | GCCUGUAAUCCCAGCACUUU | 4976 |
| GCCTGTAATCCCAGCACTTT | 1883 | GGG | − | GCCUGUAAUCCCAGCACUUU | 4977 |
| GCCTGTAATCCCAGCACTTT | 1884 | GGG | − | GCCUGUAAUCCCAGCACUUU | 4978 |
| GCCTGTAATCCCAGCACTTT | 1885 | GGG | − | GCCUGUAAUCCCAGCACUUU | 4979 |
| TCCCAAAGTGCTGGGATTAC | 1886 | AGG | − | UCCCAAAGUGCUGGGAUUAC | 4980 |
| TCCCAAAGTGCTGGGATTAC | 1887 | AGG | − | UCCCAAAGUGCUGGGAUUAC | 4981 |
| TCCCAAAGTGCTGGGATTAC | 1888 | AGG | + | UCCCAAAGUGCUGGGAUUAC | 4982 |
| TCCCAAAGTGCTGGGATTAC | 1889 | AGG | + | UCCCAAAGUGCUGGGAUUAC | 4983 |
| TCCCAAAGTGCTGGGATTAC | 1890 | AGG | + | UCCCAAAGUGCUGGGAUUAC | 4984 |
| TGTAATCCCAGCACTTTGGG | 1891 | AGG | + | UGUAAUCCCAGCACUUUGGG | 4985 |
| TGTAATCCCAGCACTTTGGG | 1892 | AGG | + | UGUAAUCCCAGCACUUUGGG | 4986 |
| TGTAATCCCAGCACTTTGGG | 1893 | AGG | + | UGUAAUCCCAGCACUUUGGG | 4987 |
| TGTAATCCCAGCACTTTGGG | 1894 | AGG | − | UGUAAUCCCAGCACUUUGGG | 4988 |
| TGTAATCCCAGCACTTTGGG | 1895 | AGG | − | UGUAAUCCCAGCACUUUGGG | 4989 |

TABLE 3
Mouse Rs1 Intron 1 Guide RNA Target Sequences and Guide
Sequences.

| Target | SEQ ID NO. | PAM | Direction | Guide | SEQ ID NO. |
|---|---|---|---|---|---|
| ACCTGAGTAATAAAAATTGT | 1896 | TGG | + | ACCUGAGUAAUAAAAAUUGU | 4990 |
| TCCAACAATTTTTATTACTC | 1897 | AGG | − | UCCAACAAUUUUUAUUACUC | 4991 |
| CAACATGCCAATTAGTTCAC | 1898 | AGG | + | CAACAUGCCAAUUAGUUCAC | 4992 |
| TTAATAACCTGTGAACTAAT | 1899 | TGG | − | UUAAUAACCUGUGAACUAAU | 4993 |
| TCACAGGTTATTAATTTAAA | 1900 | AGG | + | UCACAGGUUAUUAAUUUAAA | 4994 |
| TTTAAAAGGTCACTGTTGTG | 1901 | TGG | + | UUUAAAAGGUCACUGUUGUG | 4995 |
| CTTTGTCACTGTCTTGCTCC | 1902 | TGG | + | CUUUGUCACUGUCUUGCUCC | 4996 |
| CTGTCTTGCTCCTGGCTTCC | 1903 | TGG | + | CUGUCUUGCUCCUGGCUUCC | 4997 |
| CCTGGCTTCCTGGTTTCATG | 1904 | AGG | + | CCUGGCUUCCUGGUUUCAUG | 4998 |
| CCTCATGAAACCAGGAAGCC | 1905 | AGG | − | CCUCAUGAAACCAGGAAGCC | 4999 |
| AGAAGGTTCCTCATGAAACC | 1906 | AGG | − | AGAAGGUUCCUCAUGAAACC | 5000 |
| AATATCATTTGAACTTTAGA | 1907 | AGG | − | AAUAUCAUUUGAACUUUAGA | 5001 |
| ATTGAAACTCAACAGAAAGA | 1908 | AGG | + | AUUGAAACUCAACAGAAAGA | 5002 |
| AAACTCAACAGAAAGAAGGA | 1909 | AGG | + | AAACUCAACAGAAAGAAGGA | 5003 |
| AACTCAACAGAAAGAAGGAA | 1910 | GGG | + | AACUCAACAGAAAGAAGGAA | 5004 |
| TTGTTTTTATAGAAACTCTG | 1911 | AGG | − | UUGUUUUUAUAGAAACUCUG | 5005 |
| TAATGAGAAGTCATGTTTCT | 1912 | TGG | + | UAAUGAGAAGUCAUGUUUCU | 5006 |
| TCATGTTTCTTGGAAATTTT | 1913 | AGG | + | UCAUGUUUCUUGGAAAUUUU | 5007 |
| TGTTTCTTGGAAATTTTAGG | 1914 | AGG | + | UGUUUCUUGGAAAUUUUAGG | 5008 |
| TAGAATTTAATATTGTAAGC | 1915 | CGG | + | UAGAAUUUAAUAUUGUAAGC | 5009 |
| TGTAAGCCGGACTATTACTG | 1916 | AGG | + | UGUAAGCCGGACUAUUACUG | 5010 |
| GTAAGCCGGACTATTACTGA | 1917 | GGG | + | GUAAGCCGGACUAUUACUGA | 5011 |
| CTTAACCCTCAGTAATAGTC | 1918 | CGG | − | CUUAACCCUCAGUAAUAGUC | 5012 |
| CGGACTATTACTGAGGGTTA | 1919 | AGG | + | CGGACUAUUACUGAGGGUUA | 5013 |
| GAAGCTATTAATAGCTCTGC | 1920 | TGG | + | GAAGCUAUUAAUAGCUCUGC | 5014 |
| AAGCTATTAATAGCTCTGCT | 1921 | GGG | + | AAGCUAUUAAUAGCUCUGCU | 5015 |
| TGCTGGGACAAGTGTAAATG | 1922 | AGG | + | UGCUGGGACAAGUGUAAAUG | 5016 |
| GTGTAAATGAGGACTGTCCC | 1923 | AGG | + | GUGUAAAUGAGGACUGUCCC | 5017 |
| AGGACTGTCCCAGGCAAATC | 1924 | AGG | + | AGGACUGUCCCAGGCAAAUC | 5018 |
| TCCCAGGCAAATCAGGACAA | 1925 | AGG | + | UCCCAGGCAAAUCAGGACAA | 5019 |
| CCCAGGCAAATCAGGACAAA | 1926 | GGG | + | CCCAGGCAAAUCAGGACAAA | 5020 |
| CCCTTTGTCCTGATTTGCCT | 1927 | GGG | − | CCCUUUGUCCUGAUUUGCCU | 5021 |
| ACCCTTTGTCCTGATTTGCC | 1928 | TGG | − | ACCCUUUGUCCUGAUUUGCC | 5022 |
| GGGTCACCCTAGTTTAAATA | 1929 | TGG | + | GGGUCACCCUAGUUUAAAUA | 5023 |
| GCTAATCCATATTTAAACTA | 1930 | GGG | − | GCUAAUCCAUAUUUAAACUA | 5024 |
| TGCTAATCCATATTTAAACT | 1931 | AGG | − | UGCUAAUCCAUAUUUAAACU | 5025 |
| TTTAAATATGGATTAGCATA | 1932 | AGG | + | UUUAAAUAUGGAUUAGCAUA | 5026 |
| TATTAGACTGCAGTGGTGCT | 1933 | TGG | − | UAUUAGACUGCAGUGGUGCU | 5027 |
| AGACTTCTATTAGACTGCAG | 1934 | TGG | − | AGACUUCUAUUAGACUGCAG | 5028 |
| TAGGGTTTATTGACTTTCTT | 1935 | TGG | − | UAGGGUUUAUUGACUUUCUU | 5029 |
| TGGAATATATTGAGTCTTTA | 1936 | GGG | − | UGGAAUAUAUUGAGUCUUUA | 5030 |
| ATGGAATATATTGAGTCTTT | 1937 | AGG | − | AUGGAAUAUAUUGAGUCUUU | 5031 |
| ATTTAGAAGTTTAAAAGTGA | 1938 | TGG | − | AUUUAGAAGUUUAAAAGUGA | 5032 |
| CACTTTTAAACTTCTAAATG | 1939 | TGG | + | CACUUUUAAACUUCUAAAUG | 5033 |
| TAAACTTCTAAATGTGGCCC | 1940 | TGG | + | UAAACUUCUAAAUGUGGCCC | 5034 |
| CTTCTAAATGTGGCCCTGGC | 1941 | AGG | + | CUUCUAAAUGUGGCCCUGGC | 5035 |
| TAAGCATATTATGCCTGCCA | 1942 | GGG | − | UAAGCAUAUUAUGCCUGCCA | 5036 |
| TTAAGCATATTATGCCTGCC | 1943 | AGG | − | UUAAGCAUAUUAUGCCUGCC | 5037 |
| AGGCATAATATGCTTAAATA | 1944 | AGG | + | AGGCAUAAUAUGCUUAAAUA | 5038 |
| AGAGAGTATTATGTCTAAGA | 1945 | TGG | − | AGAGAGUAUUAUGUCUAAGA | 5039 |
| GGGCACTAGAGAGGTAAGAG | 1946 | AGG | − | GGGCACUAGAGAGGUAAGAG | 5040 |
| TGAATTGATGGGCACTAGAG | 1947 | AGG | − | UGAAUUGAUGGGCACUAGAG | 5041 |
| AAAAGGAATTCTGAATTGAT | 1948 | GGG | − | AAAAGGAAUUCUGAAUUGAU | 5042 |
| TAAAAGGAATTCTGAATTGA | 1949 | TGG | − | UAAAAGGAAUUCUGAAUUGA | 5043 |
| TTGAAAGTATAAACTTTAAA | 1950 | AGG | − | UUGAAAGUAUAAACUUUAAA | 5044 |
| TACTTTCAAATATTAAAAAT | 1951 | TGG | + | UACUUUCAAAUAUUAAAAAU | 5045 |
| AAATATTAAAAATTGGTTGA | 1952 | AGG | + | AAAUAUUAAAAAUUGGUUGA | 5046 |
| AATATTAAAAATTGGTTGAA | 1953 | GGG | + | AAUAUUAAAAAUUGGUUGAA | 5047 |
| TTAAAAATTGGTTGAAGGGT | 1954 | TGG | + | UUAAAAAUUGGUUGAAGGGU | 5048 |
| TAAAAATTGGTTGAAGGGTT | 1955 | GGG | + | UAAAAAUUGGUUGAAGGGUU | 5049 |
| AAAAATTGGTTGAAGGGTTG | 1956 | GGG | + | AAAAAUUGGUUGAAGGGUUG | 5050 |
| TGGTTGAAGGGTTGGGGATG | 1957 | TGG | + | UGGUUGAAGGGUUGGGGAUG | 5051 |
| GGGTTGGGGATGTGGCTCAG | 1958 | TGG | + | GGGUUGGGGAUGUGGCUCAG | 5052 |
| GACTCATGAAGGCTGGGCAG | 1959 | GGG | − | GACUCAUGAAGGCUGGGCAG | 5053 |
| GGACTCATGAAGGCTGGGCA | 1960 | GGG | − | GGACUCAUGAAGGCUGGGCA | 5054 |
| GGGACTCATGAAGGCTGGGC | 1961 | AGG | − | GGGACUCAUGAAGGCUGGGC | 5055 |
| CTCAGGGACTCATGAAGGCT | 1962 | GGG | − | CUCAGGGACUCAUGAAGGCU | 5056 |
| ACTCAGGGACTCATGAAGGC | 1963 | TGG | − | ACUCAGGGACUCAUGAAGGC | 5057 |
| TTTAACTCAGGGACTCATGA | 1964 | AGG | − | UUUAACUCAGGGACUCAUGA | 5058 |
| GCTTCTGGGAATTTAACTCA | 1965 | GGG | − | GCUUCUGGGAAUUUAACUCA | 5059 |
| TGCTTCTGGGAATTTAACTC | 1966 | AGG | − | UGCUUCUGGGAAUUUAACUC | 5060 |
| GTTTGTCTTATACTGCTTCT | 1967 | GGG | − | GUUUGUCUUAUACUGCUUCU | 5061 |
| TGTTTGTCTTATACTGCTTC | 1968 | TGG | − | UGUUUGUCUUAUACUGCUUC | 5062 |
| ACCTTACTTCATCCATTTTC | 1969 | TGG | + | ACCUUACUUCAUCCAUUUUC | 5063 |
| GCCAGAAAATGGATGAAGTA | 1970 | AGG | − | GCCAGAAAAUGGAUGAAGUA | 5064 |
| TGTGTAGCTATGCCAGAAAA | 1971 | TGG | − | UGUGUAGCUAUGCCAGAAAA | 5065 |
| CATACCTGCAATCCTAGTTC | 1972 | TGG | + | CAUACCUGCAAUCCUAGUUC | 5066 |
| TTGTCCAGAACTAGGATTGC | 1973 | AGG | − | UUGUCCAGAACUAGGAUUGC | 5067 |
| GCTTGAATTTGTCCAGAACT | 1974 | AGG | − | GCUUGAAUUUGUCCAGAACU | 5068 |
| AGTTCTGGACAAATTCAAGC | 1975 | AGG | + | AGUUCUGGACAAAUUCAAGC | 5069 |
| AATGCCAACCTCAGCTACTT | 1976 | AGG | + | AAUGCCAACCUCAGCUACUU | 5070 |
| CAAACCTAAGTAGCTGAGGT | 1977 | TGG | − | CAAACCUAAGUAGCUGAGGU | 5071 |
| CAACCTCAGCTACTTAGGTT | 1978 | TGG | + | CAACCUCAGCUACUUAGGUU | 5072 |
| AACCTCAGCTACTTAGGTTT | 1979 | GGG | + | AACCUCAGCUACUUAGGUUU | 5073 |
| AGCCCAAACCTAAGTAGCTG | 1980 | AGG | − | AGCCCAAACCUAAGUAGCUG | 5074 |
| CTGAGACCCTGTCTTAACAT | 1981 | TGG | + | CUGAGACCCUGUCUUAACAU | 5075 |
| TGAGACCCTGTCTTAACATT | 1982 | GGG | + | UGAGACCCUGUCUUAACAUU | 5076 |
| GAGACCCTGTCTTAACATTG | 1983 | GGG | + | GAGACCCUGUCUUAACAUUG | 5077 |
| AGACCCTGTCTTAACATTGG | 1984 | GGG | + | AGACCCUGUCUUAACAUUGG | 5078 |
| TCTCCCCCAATGTTAAGACA | 1985 | GGG | − | UCUCCCCCAAUGUUAAGACA | 5079 |
| CTCTCCCCCAATGTTAAGAC | 1986 | AGG | − | CUCUCCCCCAAUGUUAAGAC | 5080 |
| TTAACATTGGGGGAGAGCCT | 1987 | AGG | + | UUAACAUUGGGGGAGAGCCU | 5081 |
| ATTGGGGGAGAGCCTAGGCT | 1988 | AGG | + | AUUGGGGGAGAGCCUAGGCU | 5082 |
| TGTATAGCTCAGCCTAGCCT | 1989 | AGG | − | UGUAUAGCUCAGCCUAGCCU | 5083 |
| CTATACAGTAAGCCTCTGTC | 1990 | TGG | + | CUAUACAGUAAGCCUCUGUC | 5084 |
| TATACAGTAAGCCTCTGTCT | 1991 | GGG | + | UAUACAGUAAGCCUCUGUCU | 5085 |
| CAGTAAGCCTCTGTCTGGGA | 1992 | AGG | + | CAGUAAGCCUCUGUCUGGGA | 5086 |
| TAAGCCTCTGTCTGGGAAGG | 1993 | AGG | + | UAAGCCUCUGUCUGGGAAGG | 5087 |
| AAGCCTCTGTCTGGGAAGGA | 1994 | GGG | + | AAGCCUCUGUCUGGGAAGGA | 5088 |
| TTTCCCTCCTTCCCAGACAG | 1995 | AGG | − | UUUCCCUCCUUCCCAGACAG | 5089 |
| TGTCTGGGAAGGAGGGAAAA | 1996 | AGG | + | UGUCUGGGAAGGAGGGAAAA | 5090 |
| TGGGAAGGAGGGAAAAAGGA | 1997 | AGG | + | UGGGAAGGAGGGAAAAAGGA | 5091 |
| GAAAAAGGAAGGAAAGACAT | 1998 | TGG | + | GAAAAAGGAAGGAAAGACAU | 5092 |
| GACATTGGTTGAATGACTTG | 1999 | TGG | + | GACAUUGGUUGAAUGACUUG | 5093 |
| ACATTGGTTGAATGACTTGT | 2000 | GGG | + | ACAUUGGUUGAAUGACUUGU | 5094 |
| ACTGTATGTTTAGAGTGTTC | 2001 | AGG | + | ACUGUAUGUUUAGAGUGUUC | 5095 |
| CTGTATGTTTAGAGTGTTCA | 2002 | GGG | + | CUGUAUGUUUAGAGUGUUCA | 5096 |
| GTTTAGAGTGTTCAGGGAAA | 2003 | AGG | + | GUUUAGAGUGUUCAGGGAAA | 5097 |
| TAGAGTGTTCAGGGAAAAGG | 2004 | AGG | + | UAGAGUGUUCAGGGAAAAGG | 5098 |
| AGGTCATTTGCAGAGCAGAG | 2005 | AGG | − | AGGUCAUUUGCAGAGCAGAG | 5099 |
| ATTCGTCTTATCTGAGTGGC | 2006 | AGG | − | AUUCGUCUUAUCUGAGUGGC | 5100 |
| GTGTATTCGTCTTATCTGAG | 2007 | TGG | − | GUGUAUUCGUCUUAUCUGAG | 5101 |
| CATGAATATAGAAGAAACAG | 2008 | AGG | − | CAUGAAUAUAGAAGAAACAG | 5102 |
| AATAAAAGACACAAGACTGC | 2009 | TGG | − | AAUAAAAGACACAAGACUGC | 5103 |
| CTAATAATATTTCTAGTGTC | 2010 | TGG | + | CUAAUAAUAUUUCUAGUGUC | 5104 |
| CTTGAGATTTTATTTTCACA | 2011 | AGG | − | CUUGAGAUUUUAUUUUCACA | 5105 |
| CTTGTGAAAATAAAATCTCA | 2012 | AGG | + | CUUGUGAAAAUAAAAUCUCA | 5106 |
| AATAAAATCTCAAGGTCATA | 2013 | CGG | + | AAUAAAAUCUCAAGGUCAUA | 5107 |
| TACGGCAAACACAAAGAAAC | 2014 | AGG | + | UACGGCAAACACAAAGAAAC | 5108 |
| GTCTTCAGACACTCCAGAAG | 2015 | AGG | + | GUCUUCAGACACUCCAGAAG | 5109 |
| TCTTCAGACACTCCAGAAGA | 2016 | GGG | + | UCUUCAGACACUCCAGAAGA | 5110 |
| CGAGATCTGATGCCCTCTTC | 2017 | TGG | − | CGAGAUCUGAUGCCCUCUUC | 5111 |
| GAGGGCATCAGATCTCGTTA | 2018 | CGG | + | GAGGGCAUCAGAUCUCGUUA | 5112 |
| GCATCAGATCTCGTTACGGA | 2019 | TGG | + | GCAUCAGAUCUCGUUACGGA | 5113 |
| GATGGTTGTGAGCCACCATG | 2020 | TGG | + | GAUGGUUGUGAGCCACCAUG | 5114 |
| GTGAGCCACCATGTGGTTGC | 2021 | TGG | + | GUGAGCCACCAUGUGGUUGC | 5115 |
| TGAGCCACCATGTGGTTGCT | 2022 | GGG | + | UGAGCCACCAUGUGGUUGCU | 5116 |
| AAATCCCAGCAACCACATGG | 2023 | TGG | − | AAAUCCCAGCAACCACAUGG | 5117 |
| TTCAAATCCCAGCAACCACA | 2024 | TGG | − | UUCAAAUCCCAGCAACCACA | 5118 |
| GGATTTGAACTTCAGACCTT | 2025 | CGG | + | GGAUUUGAACUUCAGACCUU | 5119 |
| CAGACCTTCGGAAGAGCAGT | 2026 | CGG | + | CAGACCUUCGGAAGAGCAGU | 5120 |
| AGACCTTCGGAAGAGCAGTC | 2027 | GGG | + | AGACCUUCGGAAGAGCAGUC | 5121 |
| GCACCCGACTGCTCTTCCGA | 2028 | AGG | − | GCACCCGACUGCUCUUCCGA | 5122 |
| GGCTGGTGAGATGGCTCAGT | 2029 | GGG | − | GGCUGGUGAGAUGGCUCAGU | 5123 |
| GGGCTGGTGAGATGGCTCAG | 2030 | TGG | − | GGGCUGGUGAGAUGGCUCAG | 5124 |
| TGAGCCATCTCACCAGCCCC | 2031 | AGG | + | UGAGCCAUCUCACCAGCCCC | 5125 |
| AAAACCTGGGGCTGGTGAGA | 2032 | TGG | − | AAAACCUGGGGCUGGUGAGA | 5126 |
| AGAAAAAAAAAACCTGGGGC | 2033 | TGG | − | AGAAAAAAAAAACCUGGGGC | 5127 |
| ACTAAGAAAAAAAAAACCTG | 2034 | GGG | − | ACUAAGAAAAAAAAAACCUG | 5128 |
| AACTAAGAAAAAAAAAACCT | 2035 | GGG | − | AACUAAGAAAAAAAAAACCU | 5129 |
| CAACTAAGAAAAAAAAAACC | 2036 | TGG | − | CAACUAAGAAAAAAAAAACC | 5130 |
| TATTGTTATTCTTTTGAGAC | 2037 | AGG | + | UAUUGUUAUUCUUUUGAGAC | 5131 |
| AGGATCCCACACTGAAACTC | 2038 | AGG | + | AGGAUCCCACACUGAAACUC | 5132 |
| GCTAGCCTGAGTTTCAGTGT | 2039 | GGG | − | GCUAGCCUGAGUUUCAGUGU | 5133 |
| GGCTAGCCTGAGTTTCAGTG | 2040 | TGG | − | GGCUAGCCUGAGUUUCAGUG | 5134 |
| GGCTAGCCTTCAATTTCCTA | 2041 | TGG | + | GGCUAGCCUUCAAUUUCCUA | 5135 |
| TCAAATCCATAGGAAATTGA | 2042 | AGG | − | UCAAAUCCAUAGGAAAUUGA | 5136 |
| TGCTATGAGGTCAAATCCAT | 2043 | AGG | − | UGCUAUGAGGUCAAAUCCAU | 5137 |
| GAAACTGGCTGACTGCTATG | 2044 | AGG | − | GAAACUGGCUGACUGCUAUG | 5138 |
| AGCACTCAGAAGGTGGAAAC | 2045 | TGG | − | AGCACUCAGAAGGUGGAAAC | 5139 |
| AAATCTTAGCACTCAGAAGG | 2046 | TGG | − | AAAUCUUAGCACUCAGAAGG | 5140 |
| TTGAAATCTTAGCACTCAGA | 2047 | AGG | − | UUGAAAUCUUAGCACUCAGA | 5141 |
| GGAATTGGGTGTGGTGGCTC | 2048 | AGG | − | GGAAUUGGGUGUGGUGGCUC | 5142 |
| ATCTTAGGAATTGGGTGTGG | 2049 | TGG | − | AUCUUAGGAAUUGGGUGUGG | 5143 |
| CATATCTTAGGAATTGGGTG | 2050 | TGG | − | CAUAUCUUAGGAAUUGGGUG | 5144 |
| AAAAACATATCTTAGGAATT | 2051 | GGG | − | AAAAACAUAUCUUAGGAAUU | 5145 |
| TAAAAACATATCTTAGGAAT | 2052 | TGG | − | UAAAAACAUAUCUUAGGAAU | 5146 |
| CTTGCTTAAAAACATATCTT | 2053 | AGG | − | CUUGCUUAAAAACAUAUCUU | 5147 |
| CTAAGATATGTTTTTAAGCA | 2054 | _{A}GG | + | CUAAGAUAUGUUUUUAAGCA | 5148 |
| ATGTTTTTAAGCAAGGTTAT | 2055 | TGG | + | AUGUUUUUAAGCAAGGUUAU | 5149 |
| CACGTCATTGCAAAGGGTTA | 2056 | AGG | − | CACGUCAUUGCAAAGGGUUA | 5150 |
| ACCCTTTGCAATGACGTGTC | 2057 | AGG | + | ACCCUUUGCAAUGACGUGUC | 5151 |
| TCCTGACACGTCATTGCAAA | 2058 | GGG | − | UCCUGACACGUCAUUGCAAA | 5152 |
| TTCCTGACACGTCATTGCAA | 2059 | AGG | − | UUCCUGACACGUCAUUGCAA | 5153 |
| GACAACTGGAAAAAAAAAAA | 2060 | AGG | − | GACAACUGGAAAAAAAAAAA | 5154 |
| TTTTTTTTTTTCCAGTTGTC | 2061 | AGG | + | UUUUUUUUUUUCCAGUUGUC | 5155 |
| TTTTTTCCAGTTGTCAGGCC | 2062 | TGG | + | UUUUUUCCAGUUGUCAGGCC | 5156 |
| CCAGTTGTCAGGCCTGGCAA | 2063 | TGG | + | CCAGUUGUCAGGCCUGGCAA | 5157 |
| CCATTGCCAGGCCTGACAAC | 2064 | TGG | − | CCAUUGCCAGGCCUGACAAC | 5158 |
| CAGGCCTGGCAATGGAGCCC | 2065 | AGG | + | CAGGCCUGGCAAUGGAGCCC | 5159 |
| AGGCCTGGCAATGGAGCCCA | 2066 | GGG | + | AGGCCUGGCAAUGGAGCCCA | 5160 |
| GGGCCCTGGGCTCCATTGCC | 2067 | AGG | − | GGGCCCUGGGCUCCAUUGCC | 5161 |
| TTTAGCAAGCACAGGGCCCT | 2068 | GGG | − | UUUAGCAAGCACAGGGCCCU | 5162 |
| GTTTAGCAAGCACAGGGCCC | 2069 | TGG | − | GUUUAGCAAGCACAGGGCCC | 5163 |
| GCCCTGTGCTTGCTAAACGA | 2070 | TGG | + | GCCCUGUGCUUGCUAAACGA | 5164 |
| GCCATCGTTTAGCAAGCACA | 2071 | GGG | − | GCCAUCGUUUAGCAAGCACA | 5165 |
| AGCCATCGTTTAGCAAGCAC | 2072 | AGG | − | AGCCAUCGUUUAGCAAGCAC | 5166 |
| GCTGGGTATATATAACTTAG | 2073 | GGG | − | GCUGGGUAUAUAUAACUUAG | 5167 |
| AGCTGGGTATATATAACTTA | 2074 | GGG | − | AGCUGGGUAUAUAUAACUUA | 5168 |
| AAGCTGGGTATATATAACTT | 2075 | AGG | − | AAGCUGGGUAUAUAUAACUU | 5169 |
| ATATATACCCAGCTTATCCC | 2076 | AGG | + | AUAUAUACCCAGCUUAUCCC | 5170 |
| GAAAGATCCTGGGATAAGCT | 2077 | GGG | − | GAAAGAUCCUGGGAUAAGCU | 5171 |
| AGAAAGATCCTGGGATAAGC | 2078 | TGG | − | AGAAAGAUCCUGGGAUAAGC | 5172 |
| GAAAGTCTGAGAAAGATCCT | 2079 | GGG | − | GAAAGUCUGAGAAAGAUCCU | 5173 |
| AGAAAGTCTGAGAAAGATCC | 2080 | TGG | − | AGAAAGUCUGAGAAAGAUCC | 5174 |
| CTATCGATGTTGCTTCTCTT | 2081 | TGG | + | CUAUCGAUGUUGCUUCUCUU | 5175 |
| CTTTTTGTGAGAAAAGAGCA | 2082 | AGG | − | CUUUUUGUGAGAAAAGAGCA | 5176 |
| TCTAAGCAAGAACCCTTGTC | 2083 | TGG | + | UCUAAGCAAGAACCCUUGUC | 5177 |
| ATCTCTCTGACTCCAGACAA | 2084 | GGG | − | AUCUCUCUGACUCCAGACAA | 5178 |
| TATCTCTCTGACTCCAGACA | 2085 | AGG | − | UAUCUCUCUGACUCCAGACA | 5179 |
| GTCAGAGAGATAGCTTAGTC | 2086 | TGG | + | GUCAGAGAGAUAGCUUAGUC | 5180 |
| TTTAAACAAGAAAAGTTCTG | 2087 | GGG | − | UUUAAACAAGAAAAGUUCUG | 5181 |
| TTTTAAACAAGAAAAGTTCT | 2088 | GGG | − | UUUUAAACAAGAAAAGUUCU | 5182 |
| TTTTTAAACAAGAAAAGTTC | 2089 | TGG | − | UUUUUAAACAAGAAAAGUUC | 5183 |
| CAAACAAACAAACAAAAACT | 2090 | AGG | + | CAAACAAACAAACAAAAACU | 5184 |
| CAAAAACTAGGCATGACAGC | 2091 | TGG | + | CAAAAACUAGGCAUGACAGC | 5185 |
| ACTAGGCATGACAGCTGGAG | 2092 | AGG | + | ACUAGGCAUGACAGCUGGAG | 5186 |
| AGGCATGACAGCTGGAGAGG | 2093 | TGG | + | AGGCAUGACAGCUGGAGAGG | 5187 |
| ATTAACAGCACTTGTTAAAG | 2094 | AGG | + | AUUAACAGCACUUGUUAAAG | 5188 |
| TGTTAAAGAGGACCTCAGCT | 2095 | TGG | + | UGUUAAAGAGGACCUCAGCU | 5189 |
| AGGACCTCAGCTTGGTTCCC | 2096 | AGG | + | AGGACCUCAGCUUGGUUCCC | 5190 |
| GGACCTCAGCTTGGTTCCCA | 2097 | GGG | + | GGACCUCAGCUUGGUUCCCA | 5191 |
| GAGCCCTGGGAACCAAGCTG | 2098 | AGG | − | GAGCCCUGGGAACCAAGCUG | 5192 |
| AACTGGAGTTATAGAGCCCT | 2099 | GGG | − | AACUGGAGUUAUAGAGCCCU | 5193 |
| GAACTGGAGTTATAGAGCCC | 2100 | TGG | − | GAACUGGAGUUAUAGAGCCC | 5194 |
| GGCTCTATAACTCCAGTTCC | 2101 | AGG | + | GGCUCUAUAACUCCAGUUCC | 5195 |
| GCTCTATAACTCCAGTTCCA | 2102 | GGG | + | GCUCUAUAACUCCAGUUCCA | 5196 |
| GCTGTCTGAGGCCCTGGAAC | 2103 | TGG | − | GCUGUCUGAGGCCCUGGAAC | 5197 |
| CAGGAGGCTGTCTGAGGCCC | 2104 | TGG | − | CAGGAGGCUGUCUGAGGCCC | 5198 |
| AGGCTACAGGAGGCTGTCTG | 2105 | AGG | − | AGGCUACAGGAGGCUGUCUG | 5199 |
| ATGCATGAAGAGGCTACAGG | 2106 | AGG | − | AUGCAUGAAGAGGCUACAGG | 5200 |
| CTGATGCATGAAGAGGCTAC | 2107 | AGG | − | CUGAUGCAUGAAGAGGCUAC | 5201 |
| GCCTCTTCATGCATCAGACA | 2108 | TGG | + | GCCUCUUCAUGCAUCAGACA | 5202 |
| ACCATGTCTGATGCATGAAG | 2109 | AGG | − | ACCAUGUCUGAUGCAUGAAG | 5203 |
| GACATGGTCCATATGCATGC | 2110 | AGG | + | GACAUGGUCCAUAUGCAUGC | 5204 |
| GTGTTTGACCTGCATGCATA | 2111 | TGG | − | GUGUUUGACCUGCAUGCAUA | 5205 |
| AAAAATAAAAGTCTAAAAAA | 2112 | AGG | + | AAAAAUAAAAGUCUAAAAAA | 5206 |
| CATGCTATAATCCCAGTGCT | 2113 | AGG | + | CAUGCUAUAAUCCCAGUGCU | 5207 |
| ATGCTATAATCCCAGTGCTA | 2114 | GGG | + | AUGCUAUAAUCCCAGUGCUA | 5208 |
| CTATAATCCCAGTGCTAGGG | 2115 | AGG | + | CUAUAAUCCCAGUGCUAGGG | 5209 |
| ACATTTGCCTCCCTAGCACT | 2116 | GGG | − | ACAUUUGCCUCCCUAGCACU | 5210 |
| GACATTTGCCTCCCTAGCAC | 2117 | TGG | − | GACAUUUGCCUCCCUAGCAC | 5211 |
| GTGCTAGGGAGGCAAATGTC | 2118 | TGG | + | GUGCUAGGGAGGCAAAUGUC | 5212 |
| GGCAAATGTCTGGACCTTGT | 2119 | CGG | + | GGCAAAUGUCUGGACCUUGU | 5213 |
| AATGTCTGGACCTTGTCGGT | 2120 | CGG | + | AAUGUCUGGACCUUGUCGGU | 5214 |
| GACTGACTGGCCGACCGACA | 2121 | AGG | − | GACUGACUGGCCGACCGACA | 5215 |
| TGACTGGCTGGCTGACTGAC | 2122 | TGG | − | UGACUGGCUGGCUGACUGAC | 5216 |
| GCTAGGCTAGACTGACTGGC | 2123 | TGG | − | GCUAGGCUAGACUGACUGGC | 5217 |
| CTATGCTAGGCTAGACTGAC | 2124 | TGG | − | CUAUGCUAGGCUAGACUGAC | 5218 |
| CTAGCCTAGCATAGCCTACT | 2125 | AGG | + | CUAGCCUAGCAUAGCCUACU | 5219 |
| CACACCTAGTAGGCTATGCT | 2126 | AGG | − | CACACCUAGUAGGCUAUGCU | 5220 |
| TGGGCTGGAGCACACCTAGT | 2127 | AGG | − | UGGGCUGGAGCACACCUAGU | 5221 |
| GACAAGGTCTCTCATTGGGC | 2128 | TGG | − | GACAAGGUCUCUCAUUGGGC | 5222 |
| TAGAGACAAGGTCTCTCATT | 2129 | GGG | − | UAGAGACAAGGUCUCUCAUU | 5223 |
| TTAGAGACAAGGTCTCTCAT | 2130 | TGG | − | UUAGAGACAAGGUCUCUCAU | 5224 |
| AGACCTTGTCTCTAAAAAAA | 2131 | AGG | + | AGACCUUGUCUCUAAAAAAA | 5225 |
| GACCTTGTCTCTAAAAAAAA | 2132 | GGG | + | GACCUUGUCUCUAAAAAAAA | 5226 |
| TACCCTTTTTTTTAGAGACA | 2133 | AGG | − | UACCCUUUUUUUUAGAGACA | 5227 |
| GGTAGAAAGAAAAGACAAAA | 2134 | TGG | + | GGUAGAAAGAAAAGACAAAA | 5228 |
| GACAAAATGGATGTCTCCTG | 2135 | AGG | + | GACAAAAUGGAUGUCUCCUG | 5229 |
| CTCCTGAGGAATGATACCCA | 2136 | CGG | + | CUCCUGAGGAAUGAUACCCA | 5230 |
| ATCCGTGGGTATCATTCCTC | 2137 | AGG | − | AUCCGUGGGUAUCAUUCCUC | 5231 |
| GGACAATTGTGGGTATCCGT | 2138 | GGG | − | GGACAAUUGUGGGUAUCCGU | 5232 |
| AGGACAATTGTGGGTATCCG | 2139 | TGG | − | AGGACAAUUGUGGGUAUCCG | 5233 |
| GGATACCCACAATTGTCCTC | 2140 | TGG | + | GGAUACCCACAAUUGUCCUC | 5234 |
| GGAGACCAGAGGACAATTGT | 2141 | GGG | − | GGAGACCAGAGGACAAUUGU | 5235 |
| CGGAGACCAGAGGACAATTG | 2142 | TGG | − | CGGAGACCAGAGGACAAUUG | 5236 |
| GTATTGCACACGGAGACCAG | 2143 | AGG | − | GUAUUGCACACGGAGACCAG | 5237 |
| ACATGGGTTTGTATTGCACA | 2144 | CGG | − | ACAUGGGUUUGUAUUGCACA | 5238 |
| TGTTGCAAATATTCAGACAT | 2145 | GGG | − | UGUUGCAAAUAUUCAGACAU | 5239 |
| CTGTTGCAAATATTCAGACA | 2146 | TGG | − | CUGUUGCAAAUAUUCAGACA | 5240 |
| CATGTCTGAATATTTGCAAC | 2147 | AGG | + | CAUGUCUGAAUAUUUGCAAC | 5241 |
| ATGTCTGAATATTTGCAACA | 2148 | GGG | + | AUGUCUGAAUAUUUGCAACA | 5242 |
| AGCACAGCTTTACTAGATGA | 2149 | GGG | − | AGCACAGCUUUACUAGAUGA | 5243 |
| AAGCACAGCTTTACTAGATG | 2150 | AGG | − | AAGCACAGCUUUACUAGAUG | 5244 |
| CATCTAGTAAAGCTGTGCTT | 2151 | TGG | + | CAUCUAGUAAAGCUGUGCUU | 5245 |
| GAAAAATAAGACAGATGGGA | 2152 | GGG | − | GAAAAAUAAGACAGAUGGGA | 5246 |
| AGAAAAATAAGACAGATGGG | 2153 | AGG | − | AGAAAAAUAAGACAGAUGGG | 5247 |
| AGTAGAAAAATAAGACAGAT | 2154 | GGG | − | AGUAGAAAAAUAAGACAGAU | 5248 |
| CAGTAGAAAAATAAGACAGA | 2155 | TGG | − | CAGUAGAAAAAUAAGACAGA | 5249 |
| CATCTGTCTTATTTTTCTAC | 2156 | TGG | + | CAUCUGUCUUAUUUUUCUAC | 5250 |
| ATTTTTCTACTGGTGTGCTA | 2157 | AGG | + | AUUUUUCUACUGGUGUGCUA | 5251 |
| GTGCTAAGGCACCATGACCA | 2158 | AGG | + | GUGCUAAGGCACCAUGACCA | 5252 |
| TCTCTAAGTTGCCTTGGTCA | 2159 | TGG | − | UCUCUAAGUUGCCUUGGUCA | 5253 |
| TCTTCTTCTCTAAGTTGCCT | 2160 | TGG | − | UCUUCUUCUCUAAGUUGCCU | 5254 |
| GAAGAAGAAACAGTTTATTG | 2161 | AGG | + | GAAGAAGAAACAGUUUAUUG | 5255 |
| AAGAAGAAACAGTTTATTGA | 2162 | GGG | + | AAGAAGAAACAGUUUAUUGA | 5256 |
| TTGAGGGTTTATAGTTATAG | 2163 | AGG | + | UUGAGGGUUUAUAGUUAUAG | 5257 |
| TGAGGGTTTATAGTTATAGA | 2164 | GGG | + | UGAGGGUUUAUAGUUAUAGA | 5258 |
| GTTTATAGTTATAGAGGGTA | 2165 | AGG | + | GUUUAUAGUUAUAGAGGGUA | 5259 |
| TAGTTATAGAGGGTAAGGCA | 2166 | AGG | + | UAGUUAUAGAGGGUAAGGCA | 5260 |
| TAGAGGGTAAGGCAAGGACT | 2167 | TGG | + | UAGAGGGUAAGGCAAGGACU | 5261 |
| TAAGGCAAGGACTTGGTAGC | 2168 | AGG | + | UAAGGCAAGGACUUGGUAGC | 5262 |
| GCAAGGACTTGGTAGCAGGC | 2169 | AGG | + | GCAAGGACUUGGUAGCAGGC | 5263 |
| GGACTTGGTAGCAGGCAGGC | 2170 | AGG | + | GGACUUGGUAGCAGGCAGGC | 5264 |
| TTGGTAGCAGGCAGGCAGGC | 2171 | AGG | + | UUGGUAGCAGGCAGGCAGGC | 5265 |
| AGCAGGCAGGCAGGCAGGCA | 2172 | TGG | + | AGCAGGCAGGCAGGCAGGCA | 5266 |
| CAGGCAGGCAGGCATGGTAC | 2173 | TGG | + | CAGGCAGGCAGGCAUGGUAC | 5267 |
| CATGGTACTGGTGTAGTAGC | 2174 | TGG | + | CAUGGUACUGGUGUAGUAGC | 5268 |
| ATGGTACTGGTGTAGTAGCT | 2175 | GGG | + | AUGGUACUGGUGUAGUAGCU | 5269 |
| GGAGCTTGTATCTTGAGACA | 2176 | CGG | + | GGAGCUUGUAUCUUGAGACA | 5270 |
| AAAGCTGAGAGATAGCTAAG | 2177 | TGG | + | AAAGCUGAGAGAUAGCUAAG | 5271 |
| AAGCTGAGAGATAGCTAAGT | 2178 | GGG | + | AAGCUGAGAGAUAGCUAAGU | 5272 |
| GAGAGATAGCTAAGTGGGCC | 2179 | TGG | + | GAGAGAUAGCUAAGUGGGCC | 5273 |
| AGGTTTCAAAAGCTCACACC | 2180 | AGG | − | AGGUUUCAAAAGCUCACACC | 5274 |
| TTTCACTGGGGACAGCTTTG | 2181 | AGG | − | UUUCACUGGGGACAGCUUUG | 5275 |
| TTGATGGAGGCATTTCACTG | 2182 | GGG | − | UUGAUGGAGGCAUUUCACUG | 5276 |
| GTTGATGGAGGCATTTCACT | 2183 | GGG | − | GUUGAUGGAGGCAUUUCACU | 5277 |
| TGTTGATGGAGGCATTTCAC | 2184 | TGG | − | UGUUGAUGGAGGCAUUUCAC | 5278 |
| GTGAAATGCCTCCATCAACA | 2185 | AGG | + | GUGAAAUGCCUCCAUCAACA | 5279 |
| AGGTGTGGCCTTGTTGATGG | 2186 | AGG | − | AGGUGUGGCCUUGUUGAUGG | 5280 |
| GTTAGGTGTGGCCTTGTTGA | 2187 | TGG | − | GUUAGGUGUGGCCUUGUUGA | 5281 |
| TGTTTGGGAAGGGTTAGGTG | 2188 | TGG | − | UGUUUGGGAAGGGUUAGGUG | 5282 |
| AGAACTGTTTGGGAAGGGTT | 2189 | AGG | − | AGAACUGUUUGGGAAGGGUU | 5283 |
| TTGGTAGAACTGTTTGGGAA | 2190 | GGG | − | UUGGUAGAACUGUUUGGGAA | 5284 |
| GTTGGTAGAACTGTTTGGGA | 2191 | AGG | − | GUUGGUAGAACUGUUUGGGA | 5285 |
| TCCCAAACAGTTCTACCAAC | 2192 | TGG | + | UCCCAAACAGUUCUACCAAC | 5286 |
| CCCAAACAGTTCTACCAACT | 2193 | GGG | + | CCCAAACAGUUCUACCAACU | 5287 |
| CCCAGTTGGTAGAACTGTTT | 2194 | GGG | − | CCCAGUUGGUAGAACUGUUU | 5288 |
| TCCCAGTTGGTAGAACTGTT | 2195 | TGG | − | UCCCAGUUGGUAGAACUGUU | 5289 |
| ATGAATGCTTGGTTCCCAGT | 2196 | TGG | − | AUGAAUGCUUGGUUCCCAGU | 5290 |
| CTGAGGCTCATATGAATGCT | 2197 | TGG | − | CUGAGGCUCAUAUGAAUGCU | 5291 |
| CAAGCATTCATATGAGCCTC | 2198 | AGG | + | CAAGCAUUCAUAUGAGCCUC | 5292 |
| AAGCATTCATATGAGCCTCA | 2199 | GGG | + | AAGCAUUCAUAUGAGCCUCA | 5293 |
| AGCATTCATATGAGCCTCAG | 2200 | GGG | + | AGCAUUCAUAUGAGCCUCAG | 5294 |
| TGAATGAGACTGCTCCCCTG | 2201 | AGG | − | UGAAUGAGACUGCUCCCCUG | 5295 |
| GTACTCAGTACACTGCCCCA | 2202 | TGG | + | GUACUCAGUACACUGCCCCA | 5296 |
| TACTCAGTACACTGCCCCAT | 2203 | GGG | + | UACUCAGUACACUGCCCCAU | 5297 |
| TTAGAGGACTTCTGCCCATG | 2204 | GGG | − | UUAGAGGACUUCUGCCCAUG | 5298 |
| TTTAGAGGACTTCTGCCCAT | 2205 | GGG | − | UUUAGAGGACUUCUGCCCAU | 5299 |
| GTTTAGAGGACTTCTGCCCA | 2206 | TGG | − | GUUUAGAGGACUUCUGCCCA | 5300 |
| ATGGGCAGAAGTCCTCTAAA | 2207 | CGG | + | AUGGGCAGAAGUCCUCUAAA | 5301 |
| ACACATTAGTAACCGTTTAG | 2208 | AGG | − | ACACAUUAGUAACCGUUUAG | 5302 |
| TATCCCTCACCATACTTAGA | 2209 | AGG | + | UAUCCCUCACCAUACUUAGA | 5303 |
| TTTCCTTCTAAGTATGGTGA | 2210 | GGG | − | UUUCCUUCUAAGUAUGGUGA | 5304 |
| GTTTCCTTCTAAGTATGGTG | 2211 | AGG | − | GUUUCCUUCUAAGUAUGGUG | 5305 |
| GGCTTGTTTCCTTCTAAGTA | 2212 | TGG | − | GGCUUGUUUCCUUCUAAGUA | 5306 |
| GGAAACAAGCCATCCCAAAA | 2213 | TGG | + | GGAAACAAGCCAUCCCAAAA | 5307 |
| TCATGCTATCCATTTTGGGA | 2214 | TGG | − | UCAUGCUAUCCAUUUUGGGA | 5308 |
| TGAGTCATGCTATCCATTTT | 2215 | GGG | − | UGAGUCAUGCUAUCCAUUUU | 5309 |
| CTGAGTCATGCTATCCATTT | 2216 | TGG | − | CUGAGUCAUGCUAUCCAUUU | 5310 |
| TTGCTCTGGGTGAAGTACAC | 2217 | AGG | − | UUGCUCUGGGUGAAGUACAC | 5311 |
| TACTTCACCCAGAGCAAATG | 2218 | TGG | + | UACUUCACCCAGAGCAAAUG | 5312 |
| ACCCAGAGCAAATGTGGATA | 2219 | CGG | + | ACCCAGAGCAAAUGUGGAUA | 5313 |
| ACCGTATCCACATTTGCTCT | 2220 | GGG | − | ACCGUAUCCACAUUUGCUCU | 5314 |
| CACCGTATCCACATTTGCTC | 2221 | TGG | − | CACCGUAUCCACAUUUGCUC | 5315 |
| CAGAGCAAATGTGGATACGG | 2222 | TGG | + | CAGAGCAAAUGUGGAUACGG | 5316 |
| AGAGCAAATGTGGATACGGT | 2223 | GGG | + | AGAGCAAAUGUGGAUACGGU | 5317 |
| GTGGATACGGTGGGAAACAG | 2224 | AGG | + | GUGGAUACGGUGGGAAACAG | 5318 |
| GGGAAACAGAGGACAGTGAT | 2225 | AGG | + | GGGAAACAGAGGACAGUGAU | 5319 |
| AGGACAGTGATAGGACACAA | 2226 | AGG | + | AGGACAGUGAUAGGACACAA | 5320 |
| GTCTCAGTTTCTAGTTCAGA | 2227 | TGG | + | GUCUCAGUUUCUAGUUCAGA | 5321 |
| AGACATAAACCAACACACAT | 2228 | _{A}GG | + | AGACAUAAACCAACACACAU | 5322 |
| TGTATCTTTCCTATGTGTGT | 2229 | TGG | − | UGUAUCUUUCCUAUGUGUGU | 5323 |
| ATAGGAAAGATACACTCCAC | 2230 | TGG | + | AUAGGAAAGAUACACUCCAC | 5324 |
| AGATACACTCCACTGGACAG | 2231 | TGG | + | AGAUACACUCCACUGGACAG | 5325 |
| GATACACTCCACTGGACAGT | 2232 | GGG | + | GAUACACUCCACUGGACAGU | 5326 |
| CATGGGCTCCCACTGTCCAG | 2233 | TGG | − | CAUGGGCUCCCACUGUCCAG | 5327 |
| CAGTGGGAGCCCATGCACAA | 2234 | AGG | + | CAGUGGGAGCCCAUGCACAA | 5328 |
| GCCCATGCACAAAGGTTCTT | 2235 | TGG | + | GCCCAUGCACAAAGGUUCUU | 5329 |
| GCCAAAGAACCTTTGTGCAT | 2236 | GGG | − | GCCAAAGAACCUUUGUGCAU | 5330 |
| AGCCAAAGAACCTTTGTGCA | 2237 | TGG | − | AGCCAAAGAACCUUUGUGCA | 5331 |
| TGACAGCAGTTTCTTATTAT | 2238 | TGG | + | UGACAGCAGUUUCUUAUUAU | 5332 |
| GACAGCAGTTTCTTATTATT | 2239 | GGG | + | GACAGCAGUUUCUUAUUAUU | 5333 |
| GATGAGCTTTGTTTCTGCCC | 2240 | TGG | + | GAUGAGCUUUGUUUCUGCCC | 5334 |
| ATGAGCTTTGTTTCTGCCCT | 2241 | GGG | + | AUGAGCUUUGUUUCUGCCCU | 5335 |
| CCCTGGGTGAGAGTTTATTT | 2242 | AGG | + | CCCUGGGUGAGAGUUUAUUU | 5336 |
| CCTAAATAAACTCTCACCCA | 2243 | GGG | − | CCUAAAUAAACUCUCACCCA | 5337 |
| TCCTAAATAAACTCTCACCC | 2244 | AGG | − | UCCUAAAUAAACUCUCACCC | 5338 |
| CACACTAAGACAACCACTGA | 2245 | TGG | + | CACACUAAGACAACCACUGA | 5339 |
| ACTTTGTTCTAGGCCATCAG | 2246 | TGG | − | ACUUUGUUCUAGGCCAUCAG | 5340 |
| CAGTGCTCTGACTTTGTTCT | 2247 | AGG | − | CAGUGCUCUGACUUUGUUCU | 5341 |
| AGTCAGAGCACTGTGCGTTG | 2248 | TGG | + | AGUCAGAGCACUGUGCGUUG | 5342 |
| CACTGTGCGTTGTGGATCTT | 2249 | AGG | + | CACUGUGCGUUGUGGAUCUU | 5343 |
| GATGCTTTAATCATCATGAA | 2250 | TGG | − | GAUGCUUUAAUCAUCAUGAA | 5344 |
| ACTAACACATTTTAATAGGA | 2251 | TGG | − | ACUAACACAUUUUAAUAGGA | 5345 |
| ATGGACTAACACATTTTAAT | 2252 | AGG | − | AUGGACUAACACAUUUUAAU | 5346 |
| AAAATGTGTTAGTCCATTTT | 2253 | TGG | + | AAAAUGUGUUAGUCCAUUUU | 5347 |
| AAATGTGTTAGTCCATTTTT | 2254 | GGG | + | AAAUGUGUUAGUCCAUUUUU | 5348 |
| AATGTGTTAGTCCATTTTTG | 2255 | GGG | + | AAUGUGUUAGUCCAUUUUUG | 5349 |
| AGTAAACATAACCCCAAAAA | 2256 | TGG | − | AGUAAACAUAACCCCAAAAA | 5350 |
| GGGTTATGTTTACTATACAA | 2257 | AGG | + | GGGUUAUGUUUACUAUACAA | 5351 |
| TTATGTTTACTATACAAAGG | 2258 | TGG | + | UUAUGUUUACUAUACAAAGG | 5352 |
| GTTTACTATACAAAGGTGGA | 2259 | AGG | + | GUUUACUAUACAAAGGUGGA | 5353 |
| TTTACTATACAAAGGTGGAA | 2260 | GGG | + | UUUACUAUACAAAGGUGGAA | 5354 |
| TTACTATACAAAGGTGGAAG | 2261 | GGG | + | UUACUAUACAAAGGUGGAAG | 5355 |
| CAAAGGTGGAAGGGGTTATC | 2262 | TGG | + | CAAAGGUGGAAGGGGUUAUC | 5356 |
| GTTATCTGGCCCCATCTTAC | 2263 | AGG | + | GUUAUCUGGCCCCAUCUUAC | 5357 |
| ACACAGTTACCTGTAAGATG | 2264 | GGG | − | ACACAGUUACCUGUAAGAUG | 5358 |
| GACACAGTTACCTGTAAGAT | 2265 | GGG | − | GACACAGUUACCUGUAAGAU | 5359 |
| GGACACAGTTACCTGTAAGA | 2266 | TGG | − | GGACACAGUUACCUGUAAGA | 5360 |
| AGGTAACTGTGTCCCTTTTG | 2267 | TGG | + | AGGUAACUGUGUCCCUUUUG | 5361 |
| TGGTTTTTATATCCACAAAA | 2268 | GGG | − | UGGUUUUUAUAUCCACAAAA | 5362 |
| ATGGTTTTTATATCCACAAA | 2269 | AGG | − | AUGGUUUUUAUAUCCACAAA | 5363 |
| AATAAAATTGCAGTATCTGA | 2270 | TGG | − | AAUAAAAUUGCAGUAUCUGA | 5364 |
| TATTTTTGATTATGTGTCTG | 2271 | AGG | + | UAUUUUUGAUUAUGUGUCUG | 5365 |
| ATTTTTGATTATGTGTCTGA | 2272 | GGG | + | AUUUUUGAUUAUGUGUCUGA | 5366 |
| CAGTATGCACATCTGCATGC | 2273 | AGG | + | CAGUAUGCACAUCUGCAUGC | 5367 |
| CATCTGCATGCAGGTGCCTG | 2274 | TGG | + | CAUCUGCAUGCAGGUGCCUG | 5368 |
| CAGGTGCCTGTGGAAGCCTG | 2275 | TGG | + | CAGGUGCCUGUGGAAGCCUG | 5369 |
| ATGTCTCCACAGGCTTCCAC | 2276 | AGG | − | AUGUCUCCACAGGCUUCCAC | 5370 |
| AGGTGATCTGATGTCTCCAC | 2277 | AGG | − | AGGUGAUCUGAUGUCUCCAC | 5371 |
| GACATCAGATCACCTGAAGC | 2278 | TGG | + | GACAUCAGAUCACCUGAAGC | 5372 |
| TCACCTGAAGCTGGAGTTTC | 2279 | AGG | + | UCACCUGAAGCUGGAGUUUC | 5373 |
| CTGCCTGAAACTCCAGCTTC | 2280 | AGG | − | CUGCCUGAAACUCCAGCUUC | 5374 |
| AGTTTTATGCCACCAGACAC | 2281 | TGG | + | AGUUUUAUGCCACCAGACAC | 5375 |
| TTCTCAGCACCAGTGTCTGG | 2282 | TGG | − | UUCUCAGCACCAGUGUCUGG | 5376 |
| CTATTCTCAGCACCAGTGTC | 2283 | TGG | − | CUAUUCUCAGCACCAGUGUC | 5377 |
| ATAAAATATACTGCTTTTGC | 2284 | AGG | − | AUAAAAUAUACUGCUUUUGC | 5378 |
| GTTGCTTTTGGCTGGAGAGA | 2285 | TGG | − | GUUGCUUUUGGCUGGAGAGA | 5379 |
| TTTTAAAGGTTGCTTTTGGC | 2286 | TGG | − | UUUUAAAGGUUGCUUUUGGC | 5380 |
| CAGCTTTTAAAGGTTGCTTT | 2287 | TGG | − | CAGCUUUUAAAGGUUGCUUU | 5381 |
| AAAGCAACCTTTAAAAGCTG | 2288 | TGG | + | AAAGCAACCUUUAAAAGCUG | 5382 |
| ACATAAACCACAGCTTTTAA | 2289 | AGG | − | ACAUAAACCACAGCUUUUAA | 5383 |
| CTCTAAGTGGATGAATTAAA | 2290 | TGG | − | CUCUAAGUGGAUGAAUUAAA | 5384 |
| CATTTAATTCATCCACTTAG | 2291 | AGG | + | CAUUUAAUUCAUCCACUUAG | 5385 |
| ATTTAATTCATCCACTTAGA | 2292 | GGG | + | AUUUAAUUCAUCCACUUAGA | 5386 |
| ATTGAAGTGTACCCTCTAAG | 2293 | TGG | − | AUUGAAGUGUACCCUCUAAG | 5387 |
| AAAATATGCTTACAGATCTG | 2294 | TGG | + | AAAAUAUGCUUACAGAUCUG | 5388 |
| AAATATGCTTACAGATCTGT | 2295 | GGG | + | AAAUAUGCUUACAGAUCUGU | 5389 |
| TGCTAAAAGGGTTCTAAAAT | 2296 | TGG | − | UGCUAAAAGGGUUCUAAAAU | 5390 |
| TAATATCTGTAGTGCTAAAA | 2297 | GGG | − | UAAUAUCUGUAGUGCUAAAA | 5391 |
| TTAATATCTGTAGTGCTAAA | 2298 | AGG | − | UUAAUAUCUGUAGUGCUAAA | 5392 |
| GCTGGGGGCTGGGGAGAATA | 2299 | GGG | − | GCUGGGGGCUGGGGAGAAUA | 5393 |
| AGCTGGGGGCTGGGGAGAAT | 2300 | AGG | − | AGCUGGGGGCUGGGGAGAAU | 5394 |
| GGGACTGGAGCTGGGGGCTG | 2301 | GGG | − | GGGACUGGAGCUGGGGGCUG | 5395 |
| AGGGACTGGAGCTGGGGGCT | 2302 | GGG | − | AGGGACUGGAGCUGGGGGCU | 5396 |
| CAGGGACTGGAGCTGGGGGC | 2303 | TGG | − | CAGGGACUGGAGCUGGGGGC | 5397 |
| CAGCCCCCAGCTCCAGTCCC | 2304 | TGG | + | CAGCCCCCAGCUCCAGUCCC | 5398 |
| ATGCCAGGGACTGGAGCTGG | 2305 | GGG | − | AUGCCAGGGACUGGAGCUGG | 5399 |
| GATGCCAGGGACTGGAGCTG | 2306 | GGG | − | GAUGCCAGGGACUGGAGCUG | 5400 |
| GGATGCCAGGGACTGGAGCT | 2307 | GGG | − | GGAUGCCAGGGACUGGAGCU | 5401 |
| TGGATGCCAGGGACTGGAGC | 2308 | TGG | − | UGGAUGCCAGGGACUGGAGC | 5402 |
| GATTTGTGGATGCCAGGGAC | 2309 | TGG | − | GAUUUGUGGAUGCCAGGGAC | 5403 |
| AAGGGGATTTGTGGATGCCA | 2310 | GGG | − | AAGGGGAUUUGUGGAUGCCA | 5404 |
| GAAGGGGATTTGTGGATGCC | 2311 | AGG | − | GAAGGGGAUUUGUGGAUGCC | 5405 |
| GATGGCAGGAAGGGGATTTG | 2312 | TGG | − | GAUGGCAGGAAGGGGAUUUG | 5406 |
| AATCTATAGATGGCAGGAAG | 2313 | GGG | − | AAUCUAUAGAUGGCAGGAAG | 5407 |
| GAATCTATAGATGGCAGGAA | 2314 | GGG | − | GAAUCUAUAGAUGGCAGGAA | 5408 |
| TGAATCTATAGATGGCAGGA | 2315 | AGG | − | UGAAUCUAUAGAUGGCAGGA | 5409 |
| GAGGTGAATCTATAGATGGC | 2316 | AGG | − | GAGGUGAAUCUAUAGAUGGC | 5410 |
| AGAAGAGGTGAATCTATAGA | 2317 | TGG | − | AGAAGAGGUGAAUCUAUAGA | 5411 |
| TTCAGTGTAAAGTCTAGAAG | 2318 | AGG | − | UUCAGUGUAAAGUCUAGAAG | 5412 |
| TTCTAGACTTTACACTGAAA | 2319 | TGG | + | UUCUAGACUUUACACUGAAA | 5413 |
| AAATGGTATTACACAACATG | 2320 | TGG | + | AAAUGGUAUUACACAACAUG | 5414 |
| TTGCTTGCCGTGTGTCTGTG | 2321 | AGG | + | UUGCUUGCCGUGUGUCUGUG | 5415 |
| AGATGAACCTCACAGACACA | 2322 | CGG | − | AGAUGAACCUCACAGACACA | 5416 |
| TCATCTGTGTTGAGCATGAA | 2323 | AGG | + | UCAUCUGUGUUGAGCAUGAA | 5417 |
| TAGGCGACAGGCATATTCAT | 2324 | GGG | − | UAGGCGACAGGCAUAUUCAU | 5418 |
| TTAGGCGACAGGCATATTCA | 2325 | TGG | − | UUAGGCGACAGGCAUAUUCA | 5419 |
| GTGTTGCTATTTTAGGCGAC | 2326 | AGG | − | GUGUUGCUAUUUUAGGCGAC | 5420 |
| TGTGAAAGTGTTGCTATTTT | 2327 | AGG | − | UGUGAAAGUGUUGCUAUUUU | 5421 |
| CCTTCTTTCTTCTTCCCAAG | 2328 | AGG | + | CCUUCUUUCUUCUUCCCAAG | 5422 |
| CCTCTTGGGAAGAAGAAAGA | 2329 | AGG | − | CCUCUUGGGAAGAAGAAAGA | 5423 |
| CTTCTTTCTTCTTCCCAAGA | 2330 | GGG | + | CUUCUUUCUUCUUCCCAAGA | 5424 |
| GCTGCAATAATGTCCCTCTT | 2331 | GGG | − | GCUGCAAUAAUGUCCCUCUU | 5425 |
| GGCTGCAATAATGTCCCTCT | 2332 | TGG | − | GGCUGCAAUAAUGUCCCUCU | 5426 |
| AGACACAGGAGAAAACTAGC | 2333 | AGG | − | AGACACAGGAGAAAACUAGC | 5427 |
| AGAAACACGAAAAAAGACAC | 2334 | AGG | − | AGAAACACGAAAAAAGACAC | 5428 |
| CGTGTTTCTCAAGTAGATGA | 2335 | AGG | + | CGUGUUUCUCAAGUAGAUGA | 5429 |
| GTGTTTCTCAAGTAGATGAA | 2336 | GGG | + | GUGUUUCUCAAGUAGAUGAA | 5430 |
| TCTCAAGTAGATGAAGGGAC | 2337 | TGG | + | UCUCAAGUAGAUGAAGGGAC | 5431 |
| TTAGGAAACTGACAAAGCAG | 2338 | GGG | − | UUAGGAAACUGACAAAGCAG | 5432 |
| TTTAGGAAACTGACAAAGCA | 2339 | GGG | − | UUUAGGAAACUGACAAAGCA | 5433 |
| ATTTAGGAAACTGACAAAGC | 2340 | AGG | − | AUUUAGGAAACUGACAAAGC | 5434 |
| AATACAGTATTCACTCATTT | 2341 | AGG | − | AAUACAGUAUUCACUCAUUU | 5435 |
| AAATGAGTGAATACTGTATT | 2342 | TGG | + | AAAUGAGUGAAUACUGUAUU | 5436 |
| TATTTTGGTCTTTCTGATTG | 2343 | GGG | − | UAUUUUGGUCUUUCUGAUUG | 5437 |
| TTATTTTGGTCTTTCTGATT | 2344 | GGG | − | UUAUUUUGGUCUUUCUGAUU | 5438 |
| ATTATTTTGGTCTTTCTGAT | 2345 | TGG | − | AUUAUUUUGGUCUUUCUGAU | 5439 |
| GAGATTATTTTAAATTATTT | 2346 | TGG | − | GAGAUUAUUUUAAAUUAUUU | 5440 |
| ATCTCGTCTCTATATCACTA | 2347 | AGG | + | AUCUCGUCUCUAUAUCACUA | 5441 |
| CTAAGGTATCCTTTTCCACT | 2348 | TGG | + | CUAAGGUAUCCUUUUCCACU | 5442 |
| TAAGGTATCCTTTTCCACTT | 2349 | GGG | + | UAAGGUAUCCUUUUCCACUU | 5443 |
| CTGCATGGCCCAAGTGGAAA | 2350 | AGG | − | CUGCAUGGCCCAAGUGGAAA | 5444 |
| ATTTCTCTGCATGGCCCAAG | 2351 | TGG | − | AUUUCUCUGCAUGGCCCAAG | 5445 |
| GGCATGCTTATTTCTCTGCA | 2352 | TGG | − | GGCAUGCUUAUUUCUCUGCA | 5446 |
| GGGTGGGGTGGGGTCAATCA | 2353 | AGG | − | GGGUGGGGUGGGGUCAAUCA | 5447 |
| CTGGGGGTTGGGGTGGGGTG | 2354 | GGG | − | CUGGGGGUUGGGGUGGGGUG | 5448 |
| ACTGGGGGTTGGGGTGGGGT | 2355 | GGG | − | ACUGGGGGUUGGGGUGGGGU | 5449 |
| CACTGGGGGTTGGGGTGGGG | 2356 | TGG | − | CACUGGGGGUUGGGGUGGGG | 5450 |
| CACCCCACCCCAACCCCCAG | 2357 | TGG | + | CACCCCACCCCAACCCCCAG | 5451 |
| CACCACTGGGGGTTGGGGTG | 2358 | GGG | − | CACCACUGGGGGUUGGGGUG | 5452 |
| TCACCACTGGGGGTTGGGGT | 2359 | GGG | − | UCACCACUGGGGGUUGGGGU | 5453 |
| GTCACCACTGGGGGTTGGGG | 2360 | TGG | − | GUCACCACUGGGGGUUGGGG | 5454 |
| CTTGTCACCACTGGGGGTTG | 2361 | GGG | − | CUUGUCACCACUGGGGGUUG | 5455 |
| CCCAACCCCCAGTGGTGACA | 2362 | AGG | + | CCCAACCCCCAGUGGUGACA | 5456 |
| CCTTGTCACCACTGGGGGTT | 2363 | GGG | − | CCUUGUCACCACUGGGGGUU | 5457 |
| TCCTTGTCACCACTGGGGGT | 2364 | TGG | − | UCCUUGUCACCACUGGGGGU | 5458 |
| GAGGTCCTTGTCACCACTGG | 2365 | GGG | − | GAGGUCCUUGUCACCACUGG | 5459 |
| GGAGGTCCTTGTCACCACTG | 2366 | GGG | − | GGAGGUCCUUGUCACCACUG | 5460 |
| GGGAGGTCCTTGTCACCACT | 2367 | GGG | − | GGGAGGUCCUUGUCACCACU | 5461 |
| GGGGAGGTCCTTGTCACCAC | 2368 | TGG | − | GGGGAGGUCCUUGUCACCAC | 5462 |
| GGTGACAAGGACCTCCCCAG | 2369 | CGG | + | GGUGACAAGGACCUCCCCAG | 5463 |
| AAATGGTTGAGCCGCTGGGG | 2370 | AGG | − | AAAUGGUUGAGCCGCUGGGG | 5464 |
| TTCAAATGGTTGAGCCGCTG | 2371 | GGG | − | UUCAAAUGGUUGAGCCGCUG | 5465 |
| ATTCAAATGGTTGAGCCGCT | 2372 | GGG | − | AUUCAAAUGGUUGAGCCGCU | 5466 |
| TATTCAAATGGTTGAGCCGC | 2373 | TGG | − | UAUUCAAAUGGUUGAGCCGC | 5467 |
| GCTCAACCATTTGAATAAAA | 2374 | AGG | + | GCUCAACCAUUUGAAUAAAA | 5468 |
| AAGTGTCCTTTTTATTCAAA | 2375 | TGG | − | AAGUGUCCUUUUUAUUCAAA | 5469 |
| ATCTTAGATTTGTGCAAAAT | 2376 | GGG | − | AUCUUAGAUUUGUGCAAAAU | 5470 |
| CATCTTAGATTTGTGCAAAA | 2377 | TGG | − | CAUCUUAGAUUUGUGCAAAA | 5471 |
| ACAAATCTAAGATGAGCAAG | 2378 | TGG | + | ACAAAUCUAAGAUGAGCAAG | 5472 |
| GTCACCTGTAAACATGTGCC | 2379 | TGG | + | GUCACCUGUAAACAUGUGCC | 5473 |
| TGCTCCAGGCACATGTTTAC | 2380 | AGG | − | UGCUCCAGGCACAUGUUUAC | 5474 |
| GTAAACATGTGCCTGGAGCA | 2381 | CGG | + | GUAAACAUGUGCCUGGAGCA | 5475 |
| CTCAGGTCGTTCCGTGCTCC | 2382 | AGG | − | CUCAGGUCGUUCCGUGCUCC | 5476 |
| GAGCACGGAACGACCTGAGT | 2383 | AGG | + | GAGCACGGAACGACCUGAGU | 5477 |
| CGACCTGAGTAGGCAGAAAA | 2384 | AGG | + | CGACCUGAGUAGGCAGAAAA | 5478 |
| CCTGAGTAGGCAGAAAAAGG | 2385 | TGG | + | CCUGAGUAGGCAGAAAAAGG | 5479 |
| CCACCTTTTTCTGCCTACTC | 2386 | AGG | − | CCACCUUUUUCUGCCUACUC | 5480 |
| ATTTATGATTTTTCTTTTAA | 2387 | AGG | + | AUUUAUGAUUUUUCUUUUAA | 5481 |
| AGTGAGAAAGGTGGGGGAAA | 2388 | TGG | − | AGUGAGAAAGGUGGGGGAAA | 5482 |
| TTGGAAAGTGAGAAAGGTGG | 2389 | GGG | − | UUGGAAAGUGAGAAAGGUGG | 5483 |
| GTTGGAAAGTGAGAAAGGTG | 2390 | GGG | − | GUUGGAAAGUGAGAAAGGUG | 5484 |
| TGTTGGAAAGTGAGAAAGGT | 2391 | GGG | − | UGUUGGAAAGUGAGAAAGGU | 5485 |
| TTGTTGGAAAGTGAGAAAGG | 2392 | TGG | − | UUGUUGGAAAGUGAGAAAGG | 5486 |
| ATATTGTTGGAAAGTGAGAA | 2393 | AGG | − | AUAUUGUUGGAAAGUGAGAA | 5487 |
| TTTCCAACAATATTATATTC | 2394 | TGG | + | UUUCCAACAAUAUUAUAUUC | 5488 |
| ACACCAGAATATAATATTGT | 2395 | TGG | − | ACACCAGAAUAUAAUAUUGU | 5489 |
| CTTTTATTCCCCAGTTGTTT | 2396 | TGG | + | CUUUUAUUCCCCAGUUGUUU | 5490 |
| TTTAATCACCAAAACAACTG | 2397 | GGG | − | UUUAAUCACCAAAACAACUG | 5491 |
| ATTTAATCACCAAAACAACT | 2398 | GGG | − | AUUUAAUCACCAAAACAACU | 5492 |
| GATTTAATCACCAAAACAAC | 2399 | TGG | − | GAUUUAAUCACCAAAACAAC | 5493 |
| TTTTGGTGATTAAATCATTT | 2400 | TGG | + | UUUUGGUGAUUAAAUCAUUU | 5494 |
| TTTGGTGATTAAATCATTTT | 2401 | GGG | + | UUUGGUGAUUAAAUCAUUUU | 5495 |
| TTGGTGATTAAATCATTTTG | 2402 | GGG | + | UUGGUGAUUAAAUCAUUUUG | 5496 |
| TGGTGATTAAATCATTTTGG | 2403 | GGG | + | UGGUGAUUAAAUCAUUUUGG | 5497 |
| ACTCTCATTCACTGCTCCCT | 2404 | TGG | + | ACUCUCAUUCACUGCUCCCU | 5498 |
| AAAAAAAACACTGTCACCAA | 2405 | GGG | − | AAAAAAAACACUGUCACCAA | 5499 |
| GAAAAAAAACACTGTCACCA | 2406 | AGG | − | GAAAAAAAACACUGUCACCA | 5500 |
| GCAGAGACAGAGGGAACAGC | 2407 | AGG | − | GCAGAGACAGAGGGAACAGC | 5501 |
| TGAAAATGAGCAGAGACAGA | 2408 | GGG | − | UGAAAAUGAGCAGAGACAGA | 5502 |
| ATGAAAATGAGCAGAGACAG | 2409 | AGG | − | AUGAAAAUGAGCAGAGACAG | 5503 |
| CTGTCTCTGCTCATTTTCAT | 2410 | AGG | + | CUGUCUCUGCUCAUUUUCAU | 5504 |
| TGCTCATTTTCATAGGAATC | 2411 | TGG | + | UGCUCAUUUUCAUAGGAAUC | 5505 |
| ATCTGGCACCTTAGAATCCC | 2412 | AGG | + | AUCUGGCACCUUAGAAUCCC | 5506 |
| GCAGGCAGCCTGGGATTCTA | 2413 | AGG | − | GCAGGCAGCCUGGGAUUCUA | 5507 |
| CATTTGACTGCAGGCAGCCT | 2414 | GGG | − | CAUUUGACUGCAGGCAGCCU | 5508 |
| GCATTTGACTGCAGGCAGCC | 2415 | TGG | − | GCAUUUGACUGCAGGCAGCC | 5509 |
| CCTGCAGTCAAATGCTTGCT | 2416 | AGG | + | CCUGCAGUCAAAUGCUUGCU | 5510 |
| CCTAGCAAGCATTTGACTGC | 2417 | AGG | − | CCUAGCAAGCAUUUGACUGC | 5511 |
| CTGCAGTCAAATGCTTGCTA | 2418 | GGG | + | CUGCAGUCAAAUGCUUGCUA | 5512 |
| CAGTCAAATGCTTGCTAGGG | 2419 | AGG | + | CAGUCAAAUGCUUGCUAGGG | 5513 |
| AGTCAAATGCTTGCTAGGGA | 2420 | GGG | + | AGUCAAAUGCUUGCUAGGGA | 5514 |
| GTCAAATGCTTGCTAGGGAG | 2421 | GGG | + | GUCAAAUGCUUGCUAGGGAG | 5515 |
| TTGCTAGGGAGGGGAGCCAG | 2422 | TGG | + | UUGCUAGGGAGGGGAGCCAG | 5516 |
| TGCTAGGGAGGGGAGCCAGT | 2423 | GGG | + | UGCUAGGGAGGGGAGCCAGU | 5517 |
| TAGGGAGGGGAGCCAGTGGG | 2424 | TGG | + | UAGGGAGGGGAGCCAGUGGG | 5518 |
| AGGGAGGGGAGCCAGTGGGT | 2425 | GGG | + | AGGGAGGGGAGCCAGUGGGU | 5519 |
| GGGAGGGGAGCCAGTGGGTG | 2426 | GGG | + | GGGAGGGGAGCCAGUGGGUG | 5520 |
| GGAGGGGAGCCAGTGGGTGG | 2427 | GGG | + | GGAGGGGAGCCAGUGGGUGG | 5521 |
| TTGCAGGTTCCCCCACCCAC | 2428 | TGG | − | UUGCAGGUUCCCCCACCCAC | 5522 |
| ATTTGGAGTTGATTTCTTGC | 2429 | AGG | − | AUUUGGAGUUGAUUUCUUGC | 5523 |
| AAATCAACTCCAAATTTAAT | 2430 | AGG | + | AAAUCAACUCCAAAUUUAAU | 5524 |
| GAGCTTAGTCCTATTAAATT | 2431 | TGG | − | GAGCUUAGUCCUAUUAAAUU | 5525 |
| CTGCTAATCAGGCATGGTGT | 2432 | AGG | − | CUGCUAAUCAGGCAUGGUGU | 5526 |
| ACCATGCCTGATTAGCAGCT | 2433 | AGG | + | ACCAUGCCUGAUUAGCAGCU | 5527 |
| ACCTAGCTGCTAATCAGGCA | 2434 | TGG | − | ACCUAGCUGCUAAUCAGGCA | 5528 |
| ATGAGACCTAGCTGCTAATC | 2435 | AGG | − | AUGAGACCUAGCUGCUAAUC | 5529 |
| GGTCTCATCCTTACCCCTCC | 2436 | AGG | + | GGUCUCAUCCUUACCCCUCC | 5530 |
| TCCTTACCCCTCCAGGAATA | 2437 | AGG | + | UCCUUACCCCUCCAGGAAUA | 5531 |
| TCCTTATTCCTGGAGGGGTA | 2438 | AGG | − | UCCUUAUUCCUGGAGGGGUA | 5532 |
| TACCCCTCCAGGAATAAGGA | 2439 | AGG | + | UACCCCUCCAGGAAUAAGGA | 5533 |
| AACCTTCCTTATTCCTGGAG | 2440 | GGG | − | AACCUUCCUUAUUCCUGGAG | 5534 |
| CAACCTTCCTTATTCCTGGA | 2441 | GGG | − | CAACCUUCCUUAUUCCUGGA | 5535 |
| GCAACCTTCCTTATTCCTGG | 2442 | AGG | − | GCAACCUUCCUUAUUCCUGG | 5536 |
| TCTGCAACCTTCCTTATTCC | 2443 | TGG | − | UCUGCAACCUUCCUUAUUCC | 5537 |
| AGGTTGCAGAAGTCCCTGAA | 2444 | AGG | + | AGGUUGCAGAAGUCCCUGAA | 5538 |
| GGCTCAGCAAATACCTTTCA | 2445 | GGG | − | GGCUCAGCAAAUACCUUUCA | 5539 |
| AGGCTCAGCAAATACCTTTC | 2446 | AGG | − | AGGCUCAGCAAAUACCUUUC | 5540 |
| GCTGAGCCTCTTGTGAACCG | 2447 | TGG | + | GCUGAGCCUCUUGUGAACCG | 5541 |
| CTGAGCCTCTTGTGAACCGT | 2448 | GGG | + | CUGAGCCUCUUGUGAACCGU | 5542 |
| GCCTCTTGTGAACCGTGGGT | 2449 | TGG | + | GCCUCUUGUGAACCGUGGGU | 5543 |
| GCCAACCCACGGTTCACAAG | 2450 | AGG | − | GCCAACCCACGGUUCACAAG | 5544 |
| AGTTCAGGTGAGCCAACCCA | 2451 | CGG | − | AGUUCAGGUGAGCCAACCCA | 5545 |
| AAGAATATCTACTAAAGTTC | 2452 | AGG | − | AAGAAUAUCUACUAAAGUUC | 5546 |
| ATATTCTTTAGCGACATATT | 2453 | TGG | + | AUAUUCUUUAGCGACAUAUU | 5547 |
| TATTCTTTAGCGACATATTT | 2454 | GGG | + | UAUUCUUUAGCGACAUAUUU | 5548 |
| TTAGCGACATATTTGGGCTT | 2455 | TGG | + | UUAGCGACAUAUUUGGGCUU | 5549 |
| TGTGGAGAGATAAAAGAGAG | 2456 | AGG | − | UGUGGAGAGAUAAAAGAGAG | 5550 |
| TTATCTCTCCACAAAAGTCT | 2457 | TGG | + | UUAUCUCUCCACAAAAGUCU | 5551 |
| TCAGTTTGCCAAGACTTTTG | 2458 | TGG | − | UCAGUUUGCCAAGACUUUUG | 5552 |
| TGATGTTTATGCAACCAGTA | 2459 | AGG | + | UGAUGUUUAUGCAACCAGUA | 5553 |
| TATGCAACCAGTAAGGCCTC | 2460 | TGG | + | UAUGCAACCAGUAAGGCCUC | 5554 |
| ATGCAACCAGTAAGGCCTCT | 2461 | GGG | + | AUGCAACCAGUAAGGCCUCU | 5555 |
| TGCAACCAGTAAGGCCTCTG | 2462 | GGG | + | UGCAACCAGUAAGGCCUCUG | 5556 |
| CTCAGCCCCAGAGGCCTTAC | 2463 | TGG | − | CUCAGCCCCAGAGGCCUUAC | 5557 |
| CAGTAAGGCCTCTGGGGCTG | 2464 | AGG | + | CAGUAAGGCCUCUGGGGCUG | 5558 |
| AGTAAGGCCTCTGGGGCTGA | 2465 | GGG | + | AGUAAGGCCUCUGGGGCUGA | 5559 |
| GTAAGGCCTCTGGGGCTGAG | 2466 | GGG | + | GUAAGGCCUCUGGGGCUGAG | 5560 |
| TAAGGCCTCTGGGGCTGAGG | 2467 | GGG | + | UAAGGCCUCUGGGGCUGAGG | 5561 |
| GGCCTCTGGGGCTGAGGGGG | 2468 | TGG | + | GGCCUCUGGGGCUGAGGGGG | 5562 |
| GCCTCTGGGGCTGAGGGGGT | 2469 | GGG | + | GCCUCUGGGGCUGAGGGGGU | 5563 |
| TCCCACCCCCTCAGCCCCAG | 2470 | AGG | − | UCCCACCCCCUCAGCCCCAG | 5564 |
| CTGAGGGGGTGGGAAGCCAG | 2471 | TGG | + | CUGAGGGGGUGGGAAGCCAG | 5565 |
| TGAGGGGGTGGGAAGCCAGT | 2472 | GGG | + | UGAGGGGGUGGGAAGCCAGU | 5566 |
| GGGGGTGGGAAGCCAGTGGG | 2473 | TGG | + | GGGGGUGGGAAGCCAGUGGG | 5567 |
| GGTGGGAAGCCAGTGGGTGG | 2474 | CGG | + | GGUGGGAAGCCAGUGGGUGG | 5568 |
| TTGCAGGTTCCGCCACCCAC | 2475 | TGG | − | UUGCAGGUUCCGCCACCCAC | 5569 |
| ATTTGGGGCGGATTTCTTGC | 2476 | AGG | − | AUUUGGGGCGGAUUUCUUGC | 5570 |
| AGAAATCCGCCCCAAATTTA | 2477 | AGG | + | AGAAAUCCGCCCCAAAUUUA | 5571 |
| ATGCTTCCTTAAATTTGGGG | 2478 | CGG | − | AUGCUUCCUUAAAUUUGGGG | 5572 |
| CCCCAAATTTAAGGAAGCAT | 2479 | AGG | + | CCCCAAAUUUAAGGAAGCAU | 5573 |
| CCTATGCTTCCTTAAATTTG | 2480 | GGG | − | CCUAUGCUUCCUUAAAUUUG | 5574 |
| TCCTATGCTTCCTTAAATTT | 2481 | GGG | − | UCCUAUGCUUCCUUAAAUUU | 5575 |
| TTCCTATGCTTCCTTAAATT | 2482 | TGG | − | UUCCUAUGCUUCCUUAAAUU | 5576 |
| CCTACCCTATGTCTGCCTTG | 2483 | TGG | + | CCUACCCUAUGUCUGCCUUG | 5577 |
| CCACAAGGCAGACATAGGGT | 2484 | AGG | − | CCACAAGGCAGACAUAGGGU | 5578 |
| CTAGCCACAAGGCAGACATA | 2485 | GGG | − | CUAGCCACAAGGCAGACAUA | 5579 |
| CCTATGTCTGCCTTGTGGCT | 2486 | AGG | + | CCUAUGUCUGCCUUGUGGCU | 5580 |
| CCTAGCCACAAGGCAGACAT | 2487 | AGG | − | CCUAGCCACAAGGCAGACAU | 5581 |
| GAACTAAGGACCTAGCCACA | 2488 | AGG | − | GAACUAAGGACCUAGCCACA | 5582 |
| TCCTTAGTTCATTGTCTCTT | 2489 | AGG | + | UCCUUAGUUCAUUGUCUCUU | 5583 |
| ACCTAAGAGACAATGAACTA | 2490 | AGG | − | ACCUAAGAGACAAUGAACUA | 5584 |
| TTCTACTCTCAAGAGAATCT | 2491 | GGG | − | UUCUACUCUCAAGAGAAUCU | 5585 |
| CTTCTACTCTCAAGAGAATC | 2492 | TGG | − | CUUCUACUCUCAAGAGAAUC | 5586 |
| CAGATTCTCTTGAGAGTAGA | 2493 | AGG | + | CAGAUUCUCUUGAGAGUAGA | 5587 |
| ATTCTCTTGAGAGTAGAAGG | 2494 | TGG | + | AUUCUCUUGAGAGUAGAAGG | 5588 |
| TCTCGGATTTGTTAATCAGG | 2495 | AGG | − | UCUCGGAUUUGUUAAUCAGG | 5589 |
| TCCTGATTAACAAATCCGAG | 2496 | AGG | + | UCCUGAUUAACAAAUCCGAG | 5590 |
| ACCTCTCGGATTTGTTAATC | 2497 | AGG | − | ACCUCUCGGAUUUGUUAAUC | 5591 |
| TTCATGAGATTAGCACCTCT | 2498 | CGG | − | UUCAUGAGAUUAGCACCUCU | 5592 |
| GCTAATCTCATGAATTCTCC | 2499 | CGG | + | GCUAAUCUCAUGAAUUCUCC | 5593 |
| TCATGAATTCTCCCGGACTA | 2500 | TGG | + | UCAUGAAUUCUCCCGGACUA | 5594 |
| GCTATATATAACCATAGTCC | 2501 | GGG | − | GCUAUAUAUAACCAUAGUCC | 5595 |
| AGCTATATATAACCATAGTC | 2502 | CGG | − | AGCUAUAUAUAACCAUAGUC | 5596 |
| TCAGTGATCTCATGTAGCTT | 2503 | AGG | + | UCAGUGAUCUCAUGUAGCUU | 5597 |
| TGATCTCATGTAGCTTAGGC | 2504 | TGG | + | UGAUCUCAUGUAGCUUAGGC | 5598 |
| CTCATGTAGCTTAGGCTGGC | 2505 | TGG | + | CUCAUGUAGCUUAGGCUGGC | 5599 |
| TTGAGCTCACTATGAAGCAA | 2506 | AGG | + | UUGAGCUCACUAUGAAGCAA | 5600 |
| AAGGATGACCCTGAACTTCT | 2507 | TGG | + | AAGGAUGACCCUGAACUUCU | 5601 |
| CAGGAAAACCAAGAAGTTCA | 2508 | GGG | − | CAGGAAAACCAAGAAGUUCA | 5602 |
| GCAGGAAAACCAAGAAGTTC | 2509 | AGG | − | GCAGGAAAACCAAGAAGUUC | 5603 |
| AGCACTTGGAAGATGAAAGC | 2510 | AGG | − | AGCACUUGGAAGAUGAAAGC | 5604 |
| ATTCTTGTAATCGCAGCACT | 2511 | TGG | − | AUUCUUGUAAUCGCAGCACU | 5605 |
| GCTGCCATGTCTAGTTCATG | 2512 | TGG | + | GCUGCCAUGUCUAGUUCAUG | 5606 |
| AGCACCACATGAACTAGACA | 2513 | TGG | − | AGCACCACAUGAACUAGACA | 5607 |
| TGTCTAGTTCATGTGGTGCT | 2514 | AGG | + | UGUCUAGUUCAUGUGGUGCU | 5608 |
| GTCTAGTTCATGTGGTGCTA | 2515 | GGG | + | GUCUAGUUCAUGUGGUGCUA | 5609 |
| GGTGCTAGGGATCAACCCTG | 2516 | AGG | + | GGUGCUAGGGAUCAACCCUG | 5610 |
| TTAACATGCACAAAGCCTCA | 2517 | GGG | − | UUAACAUGCACAAAGCCUCA | 5611 |
| CTTAACATGCACAAAGCCTC | 2518 | AGG | − | CUUAACAUGCACAAAGCCUC | 5612 |
| ATTCTTTTGAGTCAGGGTCA | 2519 | GGG | − | AUUCUUUUGAGUCAGGGUCA | 5613 |
| TATTCTTTTGAGTCAGGGTC | 2520 | AGG | − | UAUUCUUUUGAGUCAGGGUC | 5614 |
| TGACCCTGACTCAAAAGAAT | 2521 | AGG | + | UGACCCUGACUCAAAAGAAU | 5615 |
| GACCCTGACTCAAAAGAATA | 2522 | GGG | + | GACCCUGACUCAAAAGAAUA | 5616 |
| ACCCTGACTCAAAAGAATAG | 2523 | GGG | + | ACCCUGACUCAAAAGAAUAG | 5617 |
| CCCTGACTCAAAAGAATAGG | 2524 | GGG | + | CCCUGACUCAAAAGAAUAGG | 5618 |
| CCCCCTATTCTTTTGAGTCA | 2525 | GGG | − | CCCCCUAUUCUUUUGAGUCA | 5619 |
| CCTGACTCAAAAGAATAGGG | 2526 | GGG | + | CCUGACUCAAAAGAAUAGGG | 5620 |
| CCCCCCTATTCTTTTGAGTC | 2527 | AGG | − | CCCCCCUAUUCUUUUGAGUC | 5621 |
| CTGACTCAAAAGAATAGGGG | 2528 | GGG | + | CUGACUCAAAAGAAUAGGGG | 5622 |
| ACTCAAAAGAATAGGGGGGG | 2529 | AGG | + | ACUCAAAAGAAUAGGGGGGG | 5623 |
| AAAAGAATAGGGGGGGAGGA | 2530 | AGG | + | AAAAGAAUAGGGGGGGAGGA | 5624 |
| GAATAGGGGGGGAGGAAGGA | 2531 | AGG | + | GAAUAGGGGGGGAGGAAGGA | 5625 |
| AGGGGGGGAGGAAGGAAGGA | 2532 | AGG | + | AGGGGGGGAGGAAGGAAGGA | 5626 |
| GGGGAGGAAGGAAGGAAGGA | 2533 | AGG | + | GGGGAGGAAGGAAGGAAGGA | 5627 |
| AGGAAGGAAGGAAGGAAGGA | 2534 | AGG | + | AGGAAGGAAGGAAGGAAGGA | 5628 |
| AGGAAGGAAGGAAGGAAGGA | 2535 | AGG | + | AGGAAGGAAGGAAGGAAGGA | 5629 |
| GGAAGGAAGGAAGGAAGGAA | 2536 | GGG | + | GGAAGGAAGGAAGGAAGGAA | 5630 |
| AGGAAGGAAGGAAGGAAGGG | 2537 | AGG | + | AGGAAGGAAGGAAGGAAGGG | 5631 |
| GGAAGGAAGGAAGGAAGGGA | 2538 | GGG | + | GGAAGGAAGGAAGGAAGGGA | 5632 |
| AGGAAGGAAGGAAGGGAGGG | 2539 | AGG | + | AGGAAGGAAGGAAGGGAGGG | 5633 |
| GGAAGGAAGGAAGGGAGGGA | 2540 | GGG | + | GGAAGGAAGGAAGGGAGGGA | 5634 |
| AGGAAGGAAGGGAGGGAGGG | 2541 | AGG | + | AGGAAGGAAGGGAGGGAGGG | 5635 |
| GGAAGGAAGGGAGGGAGGGA | 2542 | GGG | + | GGAAGGAAGGGAGGGAGGGA | 5636 |
| AGGAAGGGAGGGAGGGAGGG | 2543 | AGG | + | AGGAAGGGAGGGAGGGAGGG | 5637 |
| GGAAGGGAGGGAGGGAGGGA | 2544 | GGG | + | GGAAGGGAGGGAGGGAGGGA | 5638 |
| AGGGAGGGAGGGAGGGAGGG | 2545 | AGG | + | AGGGAGGGAGGGAGGGAGGG | 5639 |
| GGGAGGGAGGGAGGGAGGGA | 2546 | GGG | + | GGGAGGGAGGGAGGGAGGGA | 5640 |
| AGGGAGGGAGGGAGGGAGGG | 2547 | AGG | + | AGGGAGGGAGGGAGGGAGGG | 5641 |
| GGGAGGGAGGGAGGGAGGGA | 2548 | GGG | + | GGGAGGGAGGGAGGGAGGGA | 5642 |
| AGGGAGGGAGGGAGGGAGGG | 2549 | AGG | + | AGGGAGGGAGGGAGGGAGGG | 5643 |
| GGGAGGGAGGGAGGGAGGGA | 2550 | GGG | + | GGGAGGGAGGGAGGGAGGGA | 5644 |
| AGGGAGGGAGGGAGGGAGGG | 2551 | AGG | + | AGGGAGGGAGGGAGGGAGGG | 5645 |
| GGGAGGGAGGGAGGGAGGGA | 2552 | GGG | + | GGGAGGGAGGGAGGGAGGGA | 5646 |
| AGGGAGGGAGGGAGGGAGGG | 2553 | AGG | + | AGGGAGGGAGGGAGGGAGGG | 5647 |
| GGGAGGGAGGGAGGGAGGGA | 2554 | GGG | + | GGGAGGGAGGGAGGGAGGGA | 5648 |
| AGGGAGGGAGGGAGGGAGGG | 2555 | AGG | + | AGGGAGGGAGGGAGGGAGGG | 5649 |
| AGGGAGGGAGGGAGGGAGGA | 2556 | AGG | + | AGGGAGGGAGGGAGGGAGGA | 5650 |
| GATGTTGAGAACAAAAGCCA | 2557 | AGG | + | GAUGUUGAGAACAAAAGCCA | 5651 |
| GAACAAAAGCCAAGGCCAAC | 2558 | AGG | + | GAACAAAAGCCAAGGCCAAC | 5652 |
| GCCAAGGCCAACAGGTGAGT | 2559 | TGG | + | GCCAAGGCCAACAGGUGAGU | 5653 |
| CCAAGGCCAACAGGTGAGTT | 2560 | GGG | + | CCAAGGCCAACAGGUGAGUU | 5654 |
| CCCAACTCACCTGTTGGCCT | 2561 | TGG | − | CCCAACUCACCUGUUGGCCU | 5655 |
| CCAACAGGTGAGTTGGGATT | 2562 | AGG | + | CCAACAGGUGAGUUGGGAUU | 5656 |
| CCTAATCCCAACTCACCTGT | 2563 | TGG | − | CCUAAUCCCAACUCACCUGU | 5657 |
| AAAAGTCCTTTTCATAGCAA | 2564 | AGG | + | AAAAGUCCUUUUCAUAGCAA | 5658 |
| AAAGTCCTTTTCATAGCAAA | 2565 | GGG | + | AAAGUCCUUUUCAUAGCAAA | 5659 |
| AAGTCCTTTTCATAGCAAAG | 2566 | GGG | + | AAGUCCUUUUCAUAGCAAAG | 5660 |
| ACATCCCCTTTGCTATGAAA | 2567 | AGG | − | ACAUCCCCUUUGCUAUGAAA | 5661 |
| TTTTCATAGCAAAGGGGATG | 2568 | TGG | + | UUUUCAUAGCAAAGGGGAUG | 5662 |
| GTGGAAGAAGAGAAGTTGAC | 2569 | AGG | + | GUGGAAGAAGAGAAGUUGAC | 5663 |
| AGAGAAGTTGACAGGTAAGT | 2570 | AGG | + | AGAGAAGUUGACAGGUAAGU | 5664 |
| GAGAAGTTGACAGGTAAGTA | 2571 | GGG | + | GAGAAGUUGACAGGUAAGUA | 5665 |
| AGAAAAAAGAAAAAAATCTG | 2572 | TGG | + | AGAAAAAAGAAAAAAAUCUG | 5666 |
| AAGAAAAAAATCTGTGGACC | 2573 | AGG | + | AAGAAAAAAAUCUGUGGACC | 5667 |
| AGAAAAAAATCTGTGGACCA | 2574 | GGG | + | AGAAAAAAAUCUGUGGACCA | 5668 |
| AAAATCTGTGGACCAGGGCA | 2575 | TGG | + | AAAAUCUGUGGACCAGGGCA | 5669 |
| CTGCGTTTCTTGCCATGCCC | 2576 | TGG | − | CUGCGUUUCUUGCCAUGCCC | 5670 |
| GAGCAAATGTTCATAAAGAG | 2577 | AGG | + | GAGCAAAUGUUCAUAAAGAG | 5671 |
| CAAATGTTCATAAAGAGAGG | 2578 | TGG | + | CAAAUGUUCAUAAAGAGAGG | 5672 |
| AAATGTTCATAAAGAGAGGT | 2579 | GGG | + | AAAUGUUCAUAAAGAGAGGU | 5673 |
| GTTCATAAAGAGAGGTGGGC | 2580 | AGG | + | GUUCAUAAAGAGAGGUGGGC | 5674 |
| CATAAAGAGAGGTGGGCAGG | 2581 | AGG | + | CAUAAAGAGAGGUGGGCAGG | 5675 |
| GGTGGGCAGGAGGCAGACCA | 2582 | TGG | + | GGUGGGCAGGAGGCAGACCA | 5676 |
| TCTGATGAGTCTTGAGACCA | 2583 | TGG | − | UCUGAUGAGUCUUGAGACCA | 5677 |
| CAAGACTCATCAGAGAGATA | 2584 | AGG | + | CAAGACUCAUCAGAGAGAUA | 5678 |
| AGAGATAAGGCAATATCCTG | 2585 | AGG | + | AGAGAUAAGGCAAUAUCCUG | 5679 |
| TCCTGAGGAGCACCCATCTG | 2586 | AGG | + | UCCUGAGGAGCACCCAUCUG | 5680 |
| CCTGAGGAGCACCCATCTGA | 2587 | GGG | + | CCUGAGGAGCACCCAUCUGA | 5681 |
| CCCTCAGATGGGTGCTCCTC | 2588 | AGG | − | CCCUCAGAUGGGUGCUCCUC | 5682 |
| CTGAGGAGCACCCATCTGAG | 2589 | GGG | + | CUGAGGAGCACCCAUCUGAG | 5683 |
| TTGCTCAACGCCCCTCAGAT | 2590 | GGG | − | UUGCUCAACGCCCCUCAGAU | 5684 |
| CTTGCTCAACGCCCCTCAGA | 2591 | TGG | − | CUUGCUCAACGCCCCUCAGA | 5685 |
| TCTGAGGGGCGTTGAGCAAG | 2592 | TGG | + | UCUGAGGGGCGUUGAGCAAG | 5686 |
| CTGAGGGGCGTTGAGCAAGT | 2593 | GGG | + | CUGAGGGGCGUUGAGCAAGU | 5687 |
| CATTTCTCTGCATTCACAGA | 2594 | TGG | + | CAUUUCUCUGCAUUCACAGA | 5688 |
| TTCTCTGCATTCACAGATGG | 2595 | AGG | + | UUCUCUGCAUUCACAGAUGG | 5689 |
| TGCAACTATCTTTAGCAGTG | 2596 | AGG | + | UGCAACUAUCUUUAGCAGUG | 5690 |
| TCTTTAGCAGTGAGGCATGC | 2597 | TGG | + | UCUUUAGCAGUGAGGCAUGC | 5691 |
| CTTTAGCAGTGAGGCATGCT | 2598 | GGG | + | CUUUAGCAGUGAGGCAUGCU | 5692 |
| ATGCTGGGTAGTGCTAAGAG | 2599 | CGG | + | AUGCUGGGUAGUGCUAAGAG | 5693 |
| TGCTGGGTAGTGCTAAGAGC | 2600 | GGG | + | UGCUGGGUAGUGCUAAGAGC | 5694 |
| TGGGTAGTGCTAAGAGCGGG | 2601 | CGG | + | UGGGUAGUGCUAAGAGCGGG | 5695 |
| GGGTAGTGCTAAGAGCGGGC | 2602 | GGG | + | GGGUAGUGCUAAGAGCGGGC | 5696 |
| GGTAGTGCTAAGAGCGGGCG | 2603 | GGG | + | GGUAGUGCUAAGAGCGGGCG | 5697 |
| CTAAGAGCGGGCGGGGTCTG | 2604 | TGG | + | CUAAGAGCGGGCGGGGUCUG | 5698 |
| AGCGGGCGGGGTCTGTGGAA | 2605 | TGG | + | AGCGGGCGGGGUCUGUGGAA | 5699 |
| GCGGGGTCTGTGGAATGGAG | 2606 | AGG | + | GCGGGGUCUGUGGAAUGGAG | 5700 |
| AATGACGTGGTAATAAGGAG | 2607 | TGG | − | AAUGACGUGGUAAUAAGGAG | 5701 |
| AGTAAAATGACGTGGTAATA | 2608 | AGG | − | AGUAAAAUGACGUGGUAAUA | 5702 |
| TAATCAAAAGTAAAATGACG | 2609 | TGG | − | UAAUCAAAAGUAAAAUGACG | 5703 |
| CTATGTATCTTGCCTCTTGA | 2610 | CGG | + | CUAUGUAUCUUGCCUCUUGA | 5704 |
| GTACTTGTGTGACCGTCAAG | 2611 | AGG | − | GUACUUGUGUGACCGUCAAG | 5705 |
| AGTACTTCCAGTTGAAGAGT | 2612 | AGG | + | AGUACUUCCAGUUGAAGAGU | 5706 |
| TGTAATGCCTACTCTTCAAC | 2613 | TGG | − | UGUAAUGCCUACUCUUCAAC | 5707 |
| GTTGAAGAGTAGGCATTACA | 2614 | AGG | + | GUUGAAGAGUAGGCAUUACA | 5708 |
| TCTGCTTCCATGAATATTCT | 2615 | AGG | + | UCUGCUUCCAUGAAUAUUCU | 5709 |
| CTGCTTCCATGAATATTCTA | 2616 | GGG | + | CUGCUUCCAUGAAUAUUCUA | 5710 |
| AATGTGCCCTAGAATATTCA | 2617 | TGG | − | AAUGUGCCCUAGAAUAUUCA | 5711 |
| CTAGGGCACATTTTTATTCC | 2618 | AGG | + | CUAGGGCACAUUUUUAUUCC | 5712 |
| TGCTTTCATATATTTTTTCC | 2619 | TGG | − | UGCUUUCAUAUAUUUUUUCC | 5713 |
| AAAGCATTTCTAATTATGAA | 2620 | TGG | + | AAAGCAUUUCUAAUUAUGAA | 5714 |
| TTTCTAATTATGAATGGAAT | 2621 | TGG | + | UUUCUAAUUAUGAAUGGAAU | 5715 |
| CTAATTATGAATGGAATTGG | 2622 | TGG | + | CUAAUUAUGAAUGGAAUUGG | 5716 |
| TGAATGGAATTGGTGGTTTA | 2623 | TGG | + | UGAAUGGAAUUGGUGGUUUA | 5717 |
| GAATGGAATTGGTGGTTTAT | 2624 | GGG | + | GAAUGGAAUUGGUGGUUUAU | 5718 |
| AATGGAATTGGTGGTTTATG | 2625 | GGG | + | AAUGGAAUUGGUGGUUUAUG | 5719 |
| GGAACACATATGCTCAGCCT | 2626 | TGG | + | GGAACACAUAUGCUCAGCCU | 5720 |
| GGTTTTGGTAATTTATTCCA | 2627 | AGG | − | GGUUUUGGUAAUUUAUUCCA | 5721 |
| ATAAATTACCAAAACCAAAG | 2628 | AGG | + | AUAAAUUACCAAAACCAAAG | 5722 |
| GAGTCTAGCCTCTTTGGTTT | 2629 | TGG | − | GAGUCUAGCCUCUUUGGUUU | 5723 |
| AGAAGGGAGTCTAGCCTCTT | 2630 | TGG | − | AGAAGGGAGUCUAGCCUCUU | 5724 |
| GCTTCTGTTGATCGGTAGAA | 2631 | GGG | − | GCUUCUGUUGAUCGGUAGAA | 5725 |
| TGCTTCTGTTGATCGGTAGA | 2632 | AGG | − | UGCUUCUGUUGAUCGGUAGA | 5726 |
| TCTTATATGCTTCTGTTGAT | 2633 | CGG | − | UCUUAUAUGCUUCUGUUGAU | 5727 |
| CAACAGAAGCATATAAGAGT | 2634 | TGG | + | CAACAGAAGCAUAUAAGAGU | 5728 |
| TTCTCTACTCTACCAACTTG | 2635 | TGG | + | UUCUCUACUCUACCAACUUG | 5729 |
| CTACTCTACCAACTTGTGGT | 2636 | TGG | + | CUACUCUACCAACUUGUGGU | 5730 |
| TACTCTACCAACTTGTGGTT | 2637 | GGG | + | UACUCUACCAACUUGUGGUU | 5731 |
| AACAGGACCCAACCACAAGT | 2638 | TGG | − | AACAGGACCCAACCACAAGU | 5732 |
| GTCCTGTTTAGAATAATAAG | 2639 | AGG | + | GUCCUGUUUAGAAUAAUAAG | 5733 |
| TGCCTCTTATTATTCTAAAC | 2640 | AGG | − | UGCCUCUUAUUAUUCUAAAC | 5734 |
| GCATCTACATGTAGAGCTCT | 2641 | AGG | + | GCAUCUACAUGUAGAGCUCU | 5735 |
| TCTAGGAAGCCATTCAATGC | 2642 | AGG | + | UCUAGGAAGCCAUUCAAUGC | 5736 |
| GGTTTAGATCCTGCATTGAA | 2643 | TGG | − | GGUUUAGAUCCUGCAUUGAA | 5737 |
| TCAATGCAGGATCTAAACCT | 2644 | TGG | + | UCAAUGCAGGAUCUAAACCU | 5738 |
| CACAGACATTGCTAAAGCCA | 2645 | AGG | − | CACAGACAUUGCUAAAGCCA | 5739 |
| TGGCTTTAGCAATGTCTGTG | 2646 | CGG | + | UGGCUUUAGCAAUGUCUGUG | 5740 |
| AGCAATGTCTGTGCGGTACT | 2647 | TGG | + | AGCAAUGUCUGUGCGGUACU | 5741 |
| CAAAGAAAACCAAGATTTAT | 2648 | CGG | + | CAAAGAAAACCAAGAUUUAU | 5742 |
| AAAACCAAGATTTATCGGAA | 2649 | TGG | + | AAAACCAAGAUUUAUCGGAA | 5743 |
| ACCAAGATTTATCGGAATGG | 2650 | TGG | + | ACCAAGAUUUAUCGGAAUGG | 5744 |
| TCCACCATTCCGATAAATCT | 2651 | TGG | − | UCCACCAUUCCGAUAAAUCU | 5745 |
| GGTGGACACTGAAAGTAGAC | 2652 | AGG | + | GGUGGACACUGAAAGUAGAC | 5746 |
| ACACTGAAAGTAGACAGGAA | 2653 | AGG | + | ACACUGAAAGUAGACAGGAA | 5747 |
| CCTAGTGTGCAGTGTGCAGA | 2654 | TGG | + | CCUAGUGUGCAGUGUGCAGA | 5748 |
| CCATCTGCACACTGCACACT | 2655 | AGG | − | CCAUCUGCACACUGCACACU | 5749 |
| GTGTGCAGTGTGCAGATGGA | 2656 | AGG | + | GUGUGCAGUGUGCAGAUGGA | 5750 |
| TGTGCAGTGTGCAGATGGAA | 2657 | GGG | + | UGUGCAGUGUGCAGAUGGAA | 5751 |
| TGCAGATGGAAGGGCAGTGC | 2658 | TGG | + | UGCAGAUGGAAGGGCAGUGC | 5752 |
| GCAGATGGAAGGGCAGTGCT | 2659 | GGG | + | GCAGAUGGAAGGGCAGUGCU | 5753 |
| CAGATGGAAGGGCAGTGCTG | 2660 | GGG | + | CAGAUGGAAGGGCAGUGCUG | 5754 |
| TGGGGAGAATCCATTGCATT | 2661 | TGG | + | UGGGGAGAAUCCAUUGCAUU | 5755 |
| CTTCTTCTTTCCAAATGCAA | 2662 | TGG | − | CUUCUUCUUUCCAAAUGCAA | 5756 |
| TTAGCAAAAGAAATCGCAGA | 2663 | GGG | − | UUAGCAAAAGAAAUCGCAGA | 5757 |
| ATTAGCAAAAGAAATCGCAG | 2664 | AGG | − | AUUAGCAAAAGAAAUCGCAG | 5758 |
| GCGATTTCTTTTGCTAATGC | 2665 | AGG | + | GCGAUUUCUUUUGCUAAUGC | 5759 |
| AAGCAAGTACTACAGTGAAA | 2666 | AGG | − | AAGCAAGUACUACAGUGAAA | 5760 |
| TTCACTGTAGTACTTGCTTG | 2667 | TGG | + | UUCACUGUAGUACUUGCUUG | 5761 |
| ACTGTAGTACTTGCTTGTGG | 2668 | TGG | + | ACUGUAGUACUUGCUUGUGG | 5762 |
| TGTGGTGGTTTGAATGAAAA | 2669 | TGG | + | UGUGGUGGUUUGAAUGAAAA | 5763 |
| TGAATGAAAATGGTCCCCAC | 2670 | AGG | + | UGAAUGAAAAUGGUCCCCAC | 5764 |
| GTTTTCAAAAATAGCCTGTG | 2671 | GGG | − | GUUUUCAAAAAUAGCCUGUG | 5765 |
| AGTTTTCAAAAATAGCCTGT | 2672 | GGG | − | AGUUUUCAAAAAUAGCCUGU | 5766 |
| AAGTTTTCAAAAATAGCCTG | 2673 | TGG | − | AAGUUUUCAAAAAUAGCCUG | 5767 |
| TTGAAAACTTGATCCCCAGT | 2674 | TGG | + | UUGAAAACUUGAUCCCCAGU | 5768 |
| CCCCAGTTGGTGAAACTGTT | 2675 | TGG | + | CCCCAGUUGGUGAAACUGUU | 5769 |
| CCAAACAGTTTCACCAACTG | 2676 | GGG | − | CCAAACAGUUUCACCAACUG | 5770 |
| TCCAAACAGTTTCACCAACT | 2677 | GGG | − | UCCAAACAGUUUCACCAACU | 5771 |
| TTCCAAACAGTTTCACCAAC | 2678 | TGG | − | UUCCAAACAGUUUCACCAAC | 5772 |
| GTTGGTGAAACTGTTTGGAA | 2679 | AGG | + | GUUGGUGAAACUGUUUGGAA | 5773 |
| GAAACTGTTTGGAAAGGATT | 2680 | AGG | + | GAAACUGUUUGGAAAGGAUU | 5774 |
| TTGGAAAGGATTAGGAAGTG | 2681 | TGG | + | UUGGAAAGGAUUAGGAAGUG | 5775 |
| ATTAGGAAGTGTGGCCTTGC | 2682 | TGG | + | AUUAGGAAGUGUGGCCUUGC | 5776 |
| AAGTGTGGCCTTGCTGGATG | 2683 | AGG | + | AAGUGUGGCCUUGCUGGAUG | 5777 |
| TTGACAGACCTCATCCAGCA | 2684 | AGG | − | UUGACAGACCUCAUCCAGCA | 5778 |
| TGCTGGATGAGGTCTGTCAA | 2685 | TGG | + | UGCUGGAUGAGGUCUGUCAA | 5779 |
| TGGATGAGGTCTGTCAATGG | 2686 | CGG | + | UGGAUGAGGUCUGUCAAUGG | 5780 |
| TGAGGTCTGTCAATGGCGGA | 2687 | AGG | + | UGAGGUCUGUCAAUGGCGGA | 5781 |
| GAGACAGAGAGAGGCACACT | 2688 | GGG | − | GAGACAGAGAGAGGCACACU | 5782 |
| GGAGACAGAGAGAGGCACAC | 2689 | TGG | − | GGAGACAGAGAGAGGCACAC | 5783 |
| AATAAGTAGGAGACAGAGAG | 2690 | AGG | − | AAUAAGUAGGAGACAGAGAG | 5784 |
| TCATTTTTCAATCAATAAGT | 2691 | AGG | − | UCAUUUUUCAAUCAAUAAGU | 5785 |
| AATTCTGGATGGCAGAGCAA | 2692 | AGG | − | AAUUCUGGAUGGCAGAGCAA | 5786 |
| TGGGTGATTAGAATTCTGGA | 2693 | TGG | − | UGGGUGAUUAGAAUUCUGGA | 5787 |
| GTTTTGGGTGATTAGAATTC | 2694 | TGG | − | GUUUUGGGUGAUUAGAAUUC | 5788 |
| TAATTAGGCTATATGGTTTT | 2695 | GGG | − | UAAUUAGGCUAUAUGGUUUU | 5789 |
| TTAATTAGGCTATATGGTTT | 2696 | TGG | − | UUAAUUAGGCUAUAUGGUUU | 5790 |
| CAGTATTTAATTAGGCTATA | 2697 | TGG | − | CAGUAUUUAAUUAGGCUAUA | 5791 |
| TATAAAAACAGTATTTAATT | 2698 | AGG | − | UAUAAAAACAGUAUUUAAUU | 5792 |
| ACTGTTTTTATAAGTTACCT | 2699 | TGG | + | ACUGUUUUUAUAAGUUACCU | 5793 |
| TTTATAAGTTACCTTGGTCA | 2700 | TGG | + | UUUAUAAGUUACCUUGGUCA | 5794 |
| TACCTTGGTCATGGTACTTT | 2701 | AGG | + | UACCUUGGUCAUGGUACUUU | 5795 |
| ATCCTAAAGTACCATGACCA | 2702 | AGG | − | AUCCUAAAGUACCAUGACCA | 5796 |
| TAGTTAAGAAACTAAGACAT | 2703 | TGG | + | UAGUUAAGAAACUAAGACAU | 5797 |
| CTTAACCAAAACACCACAGA | 2704 | CGG | + | CUUAACCAAAACACCACAGA | 5798 |
| TTAACCAAAACACCACAGAC | 2705 | GGG | + | UUAACCAAAACACCACAGAC | 5799 |
| CAAGCCCGTCTGTGGTGTTT | 2706 | TGG | − | CAAGCCCGUCUGUGGUGUUU | 5800 |
| GTCATATGCAAGCCCGTCTG | 2707 | TGG | − | GUCAUAUGCAAGCCCGUCUG | 5801 |
| GCATATGACAACAGTTCTAG | 2708 | AGG | + | GCAUAUGACAACAGUUCUAG | 5802 |
| CCCTGATCAAATGCCCTAGC | 2709 | AGG | + | CCCUGAUCAAAUGCCCUAGC | 5803 |
| CCTGCTAGGGCATTTGATCA | 2710 | GGG | − | CCUGCUAGGGCAUUUGAUCA | 5804 |
| ACCTGCTAGGGCATTTGATC | 2711 | AGG | − | ACCUGCUAGGGCAUUUGAUC | 5805 |
| ATCAGACACAGAACCTGCTA | 2712 | GGG | − | AUCAGACACAGAACCUGCUA | 5806 |
| CATCAGACACAGAACCTGCT | 2713 | AGG | − | CAUCAGACACAGAACCUGCU | 5807 |
| AGCAGGTTCTGTGTCTGATG | 2714 | AGG | + | AGCAGGUUCUGUGUCUGAUG | 5808 |
| GCAGGTTCTGTGTCTGATGA | 2715 | GGG | + | GCAGGUUCUGUGUCUGAUGA | 5809 |
| CTGTGTCTGATGAGGGCTGC | 2716 | TGG | + | CUGUGUCUGAUGAGGGCUGC | 5810 |
| TGATGAGGGCTGCTGGTTCA | 2717 | TGG | + | UGAUGAGGGCUGCUGGUUCA | 5811 |
| GATGAGGGCTGCTGGTTCAT | 2718 | GGG | + | GAUGAGGGCUGCUGGUUCAU | 5812 |
| GAGGGCTGCTGGTTCATGGG | 2719 | TGG | + | GAGGGCUGCUGGUUCAUGGG | 5813 |
| CTTTTTCTCAGTGTCCTTAC | 2720 | AGG | + | CUUUUUCUCAGUGUCCUUAC | 5814 |
| TTTCTCAGTGTCCTTACAGG | 2721 | TGG | + | UUUCUCAGUGUCCUUACAGG | 5815 |
| TCAGTGTCCTTACAGGTGGA | 2722 | AGG | + | UCAGUGUCCUUACAGGUGGA | 5816 |
| CTGGATACCTTCCACCTGTA | 2723 | AGG | − | CUGGAUACCUUCCACCUGUA | 5817 |
| TGGAAGGTATCCAGCTTTCT | 2724 | TGG | + | UGGAAGGUAUCCAGCUUUCU | 5818 |
| AATATAAGGTCCAAGAAAGC | 2725 | TGG | − | AAUAUAAGGUCCAAGAAAGC | 5819 |
| GGAATGCGTGCTTTAATATA | 2726 | AGG | − | GGAAUGCGUGCUUUAAUAUA | 5820 |
| AAGCTATCTACTCACATCAA | 2727 | TGG | − | AAGCUAUCUACUCACAUCAA | 5821 |
| GAGGTGCTTAAATCACTTTG | 2728 | GGG | − | GAGGUGCUUAAAUCACUUUG | 5822 |
| GGAGGTGCTTAAATCACTTT | 2729 | GGG | − | GGAGGUGCUUAAAUCACUUU | 5823 |
| TGGAGGTGCTTAAATCACTT | 2730 | TGG | − | UGGAGGUGCUUAAAUCACUU | 5824 |
| CCTCCAAAACCCTCCGTCTC | 2731 | CGG | + | CCUCCAAAACCCUCCGUCUC | 5825 |
| CCGGAGACGGAGGGTTTTGG | 2732 | AGG | − | CCGGAGACGGAGGGUUUUGG | 5826 |
| CATCCGGAGACGGAGGGTTT | 2733 | TGG | − | CAUCCGGAGACGGAGGGUUU | 5827 |
| GGGGAGCATCCGGAGACGGA | 2734 | GGG | − | GGGGAGCAUCCGGAGACGGA | 5828 |
| GGGGGAGCATCCGGAGACGG | 2735 | AGG | − | GGGGGAGCAUCCGGAGACGG | 5829 |
| AATGGGGGAGCATCCGGAGA | 2736 | CGG | − | AAUGGGGGAGCAUCCGGAGA | 5830 |
| GTCTCCGGATGCTCCCCCAT | 2737 | TGG | + | GUCUCCGGAUGCUCCCCCAU | 5831 |
| TTCACCAATGGGGGAGCATC | 2738 | CGG | − | UUCACCAAUGGGGGAGCAUC | 5832 |
| TGAAATCTGTTCACCAATGG | 2739 | GGG | − | UGAAAUCUGUUCACCAAUGG | 5833 |
| TTGAAATCTGTTCACCAATG | 2740 | GGG | − | UUGAAAUCUGUUCACCAAUG | 5834 |
| GTTGAAATCTGTTCACCAAT | 2741 | GGG | − | GUUGAAAUCUGUUCACCAAU | 5835 |
| TGTTGAAATCTGTTCACCAA | 2742 | TGG | − | UGUUGAAAUCUGUUCACCAA | 5836 |
| TTTCAACATAGCAATTGAGC | 2743 | AGG | + | UUUCAACAUAGCAAUUGAGC | 5837 |
| CAACATAGCAATTGAGCAGG | 2744 | AGG | + | CAACAUAGCAAUUGAGCAGG | 5838 |
| TAGCAATTGAGCAGGAGGAA | 2745 | AGG | + | UAGCAAUUGAGCAGGAGGAA | 5839 |
| CTGGCTGTGATCAAATAATT | 2746 | TGG | − | CUGGCUGUGAUCAAAUAAUU | 5840 |
| TTTGATCACAGCCAGTACTT | 2747 | TGG | + | UUUGAUCACAGCCAGUACUU | 5841 |
| TTGGGTGTTCACCAAAGTAC | 2748 | TGG | − | UUGGGUGUUCACCAAAGUAC | 5842 |
| GTGAACACCCAAACCCAGCA | 2749 | TGG | + | GUGAACACCCAAACCCAGCA | 5843 |
| TTCAGCTCCATGCTGGGTTT | 2750 | GGG | − | UUCAGCUCCAUGCUGGGUUU | 5844 |
| ATTCAGCTCCATGCTGGGTT | 2751 | TGG | − | AUUCAGCUCCAUGCUGGGUU | 5845 |
| CAGATATTCAGCTCCATGCT | 2752 | GGG | − | CAGAUAUUCAGCUCCAUGCU | 5846 |
| ACAGATATTCAGCTCCATGC | 2753 | TGG | − | ACAGAUAUUCAGCUCCAUGC | 5847 |
| CTGTAATCTCAGTATCCAGC | 2754 | AGG | + | CUGUAAUCUCAGUAUCCAGC | 5848 |
| TAATCTCAGTATCCAGCAGG | 2755 | TGG | + | UAAUCUCAGUAUCCAGCAGG | 5849 |
| AGTATCCAGCAGGTGGATAT | 2756 | TGG | + | AGUAUCCAGCAGGUGGAUAU | 5850 |
| GTATCCAGCAGGTGGATATT | 2757 | GGG | + | GUAUCCAGCAGGUGGAUAUU | 5851 |
| TATCCAGCAGGTGGATATTG | 2758 | GGG | + | UAUCCAGCAGGUGGAUAUUG | 5852 |
| ATTCCCCAATATCCACCTGC | 2759 | TGG | − | AUUCCCCAAUAUCCACCUGC | 5853 |
| ATTGGGGAATTAAGACTTCA | 2760 | AGG | + | AUUGGGGAAUUAAGACUUCA | 5854 |
| TAAGACTTCAAGGCCAGACT | 2761 | TGG | + | UAAGACUUCAAGGCCAGACU | 5855 |
| ACTTACTATGTAGCCAAGTC | 2762 | TGG | − | ACUUACUAUGUAGCCAAGUC | 5856 |
| TAGTAAGTTTGATGCCATCC | 2763 | TGG | + | UAGUAAGUUUGAUGCCAUCC | 5857 |
| AGTAAGTTTGATGCCATCCT | 2764 | GGG | + | AGUAAGUUUGAUGCCAUCCU | 5858 |
| GGATCTCATATAGCCCAGGA | 2765 | TGG | − | GGAUCUCAUAUAGCCCAGGA | 5859 |
| AACAGGATCTCATATAGCCC | 2766 | AGG | − | AACAGGAUCUCAUAUAGCCC | 5860 |
| TATTTGGGGGTTTTGGAAAC | 2767 | AGG | − | UAUUUGGGGGUUUUGGAAAC | 5861 |
| TTGTTTCTATTTGGGGGTTT | 2768 | TGG | − | UUGUUUCUAUUUGGGGGUUU | 5862 |
| TTTTTATTGTTTCTATTTGG | 2769 | GGG | − | UUUUUAUUGUUUCUAUUUGG | 5863 |
| TTTTTTATTGTTTCTATTTG | 2770 | GGG | − | UUUUUUAUUGUUUCUAUUUG | 5864 |
| TTTTTTTATTGTTTCTATTT | 2771 | GGG | − | UUUUUUUAUUGUUUCUAUUU | 5865 |
| ATTTTTTTATTGTTTCTATT | 2772 | TGG | − | AUUUUUUUAUUGUUUCUAUU | 5866 |
| AAATAGAAACAATAAAAAAA | 2773 | TGG | + | AAAUAGAAACAAUAAAAAAA | 5867 |
| TAGGGTAGCAGTGAACATGA | 2774 | AGG | − | UAGGGUAGCAGUGAACAUGA | 5868 |
| ATGTTCACTGCTACCCTAGA | 2775 | AGG | + | AUGUUCACUGCUACCCUAGA | 5869 |
| CAAGCAAAACTGACCTTCTA | 2776 | GGG | − | CAAGCAAAACUGACCUUCUA | 5870 |
| ACAAGCAAAACTGACCTTCT | 2777 | AGG | − | ACAAGCAAAACUGACCUUCU | 5871 |
| TTGTAACAGATGACTAACAG | 2778 | AGG | + | UUGUAACAGAUGACUAACAG | 5872 |
| AGATGACTAACAGAGGAACA | 2779 | AGG | + | AGAUGACUAACAGAGGAACA | 5873 |
| CTAACAGAGGAACAAGGTCC | 2780 | CGG | + | CUAACAGAGGAACAAGGUCC | 5874 |
| AGCATACTGGTAGCTCTTCC | 2781 | GGG | − | AGCAUACUGGUAGCUCUUCC | 5875 |
| CAGCATACTGGTAGCTCTTC | 2782 | CGG | − | CAGCAUACUGGUAGCUCUUC | 5876 |
| CGGAAGAGCTACCAGTATGC | 2783 | TGG | + | CGGAAGAGCUACCAGUAUGC | 5877 |
| TTCATTGGCAGCCAGCATAC | 2784 | TGG | − | UUCAUUGGCAGCCAGCAUAC | 5878 |
| TAAGACTTCAGCAGCTTCAT | 2785 | TGG | − | UAAGACUUCAGCAGCUUCAU | 5879 |
| GCTGAAGTCTTAGTAGATTT | 2786 | AGG | + | GCUGAAGUCUUAGUAGAUUU | 5880 |
| CTTAGTAGATTTAGGAGCTA | 2787 | TGG | + | CUUAGUAGAUUUAGGAGCUA | 5881 |
| CTGGGGCTGTGATGGAAGTC | 2788 | AGG | − | CUGGGGCUGUGAUGGAAGUC | 5882 |
| TGGTGGTGCTGGGGCTGTGA | 2789 | TGG | − | UGGUGGUGCUGGGGCUGUGA | 5883 |
| TCACAGCCCCAGCACCACCA | 2790 | TGG | + | UCACAGCCCCAGCACCACCA | 5884 |
| CACAGCCCCAGCACCACCAT | 2791 | GGG | + | CACAGCCCCAGCACCACCAU | 5885 |
| CAGTGCCCATGGTGGTGCTG | 2792 | GGG | − | CAGUGCCCAUGGUGGUGCUG | 5886 |
| GCAGTGCCCATGGTGGTGCT | 2793 | GGG | − | GCAGUGCCCAUGGUGGUGCU | 5887 |
| GGCAGTGCCCATGGTGGTGC | 2794 | TGG | − | GGCAGUGCCCAUGGUGGUGC | 5888 |
| CTGCTGGGCAGTGCCCATGG | 2795 | TGG | − | CUGCUGGGCAGUGCCCAUGG | 5889 |
| AGACTGCTGGGCAGTGCCCA | 2796 | TGG | − | AGACUGCUGGGCAGUGCCCA | 5890 |
| CTAAAAGAAGATAGACTGCT | 2797 | GGG | − | CUAAAAGAAGAUAGACUGCU | 5891 |
| CCAGCAGTCTATCTTCTTTT | 2798 | AGG | + | CCAGCAGUCUAUCUUCUUUU | 5892 |
| CCTAAAAGAAGATAGACTGC | 2799 | TGG | − | CCUAAAAGAAGAUAGACUGC | 5893 |
| CTATCTTCTTTTAGGTCTTC | 2800 | AGG | + | CUAUCUUCUUUUAGGUCUUC | 5894 |
| TTTAGGTCTTCAGGTGTCCC | 2801 | TGG | + | UUUAGGUCUUCAGGUGUCCC | 5895 |
| TTAGGTCTTCAGGTGTCCCT | 2802 | GGG | + | UUAGGUCUUCAGGUGUCCCU | 5896 |
| GTGTCCCTGGGTAGAGAACA | 2803 | AGG | + | GUGUCCCUGGGUAGAGAACA | 5897 |
| GAAGCCTTGTTCTCTACCCA | 2804 | GGG | − | GAAGCCUUGUUCUCUACCCA | 5898 |
| AGAAGCCTTGTTCTCTACCC | 2805 | AGG | − | AGAAGCCUUGUUCUCUACCC | 5899 |
| AACAAGGCTTCTGCTTGCAT | 2806 | AGG | + | AACAAGGCUUCUGCUUGCAU | 5900 |
| ACAAGGCTTCTGCTTGCATA | 2807 | GGG | + | ACAAGGCUUCUGCUUGCAUA | 5901 |
| GTGAGACTGTCACTGTACTG | 2808 | GGG | − | GUGAGACUGUCACUGUACUG | 5902 |
| TGTGAGACTGTCACTGTACT | 2809 | GGG | − | UGUGAGACUGUCACUGUACU | 5903 |
| TTGTGAGACTGTCACTGTAC | 2810 | TGG | − | UUGUGAGACUGUCACUGUAC | 5904 |
| TCACAATGAGTGCAGCAATG | 2811 | TGG | + | UCACAAUGAGUGCAGCAAUG | 5905 |
| GCAGCAATGTGGCCACAGAA | 2812 | CGG | + | GCAGCAAUGUGGCCACAGAA | 5906 |
| CAGCAATGTGGCCACAGAAC | 2813 | GGG | + | CAGCAAUGUGGCCACAGAAC | 5907 |
| AGCAATGTGGCCACAGAACG | 2814 | GGG | + | AGCAAUGUGGCCACAGAACG | 5908 |
| ACACACATTTCCCCGTTCTG | 2815 | TGG | − | ACACACAUUUCCCCGUUCUG | 5909 |
| TCAAGCTGAAAGCTTTTCAC | 2816 | AGG | + | UCAAGCUGAAAGCUUUUCAC | 5910 |
| TCTCTTGCTAAATGACAAAG | 2817 | TGG | + | UCUCUUGCUAAAUGACAAAG | 5911 |
| CTAAATGACAAAGTGGTTAG | 2818 | AGG | + | CUAAAUGACAAAGUGGUUAG | 5912 |
| AATGACAAAGTGGTTAGAGG | 2819 | AGG | + | AAUGACAAAGUGGUUAGAGG | 5913 |
| ATGACAAAGTGGTTAGAGGA | 2820 | GGG | + | AUGACAAAGUGGUUAGAGGA | 5914 |
| GTGTAGACAATGAAAGCTGT | 2821 | AGG | − | GUGUAGACAAUGAAAGCUGU | 5915 |
| AGCTTTCATTGTCTACACTC | 2822 | AGG | + | AGCUUUCAUUGUCUACACUC | 5916 |
| TCTTTTGAGAATTTTACAGT | 2823 | AGG | + | UCUUUUGAGAAUUUUACAGU | 5917 |
| CTAGTCAACACAGAAATAAA | 2824 | AGG | + | CUAGUCAACACAGAAAUAAA | 5918 |
| TTTGTTTTGTTGAAAAGAAG | 2825 | TGG | + | UUUGUUUUGUUGAAAAGAAG | 5919 |
| TTGTTTTGTTGAAAAGAAGT | 2826 | GGG | + | UUGUUUUGUUGAAAAGAAGU | 5920 |
| TGTTTTGTTGAAAAGAAGTG | 2827 | GGG | + | UGUUUUGUUGAAAAGAAGUG | 5921 |
| GTTTTGTTGAAAAGAAGTGG | 2828 | GGG | + | GUUUUGUUGAAAAGAAGUGG | 5922 |
| TTGAAAAGAAGTGGGGGTTT | 2829 | TGG | + | UUGAAAAGAAGUGGGGGUUU | 5923 |
| TGGGGGTTTTGGTACTGATG | 2830 | AGG | + | UGGGGGUUUUGGUACUGAUG | 5924 |
| GGGGGTTTTGGTACTGATGA | 2831 | GGG | + | GGGGGUUUUGGUACUGAUGA | 5925 |
| GGGGTTTTGGTACTGATGAG | 2832 | GGG | + | GGGGUUUUGGUACUGAUGAG | 5926 |
| TATGTTACTTATTCATTCTC | 2833 | AGG | + | UAUGUUACUUAUUCAUUCUC | 5927 |
| CTTATTCATTCTCAGGTTCA | 2834 | TGG | + | CUUAUUCAUUCUCAGGUUCA | 5928 |
| TTAATCTATCATTTGTCATA | 2835 | AGG | − | UUAAUCUAUCAUUUGUCAUA | 5929 |
| TAATAAAAGCATGCAAATGC | 2836 | TGG | + | UAAUAAAAGCAUGCAAAUGC | 5930 |
| TGCAAATGCTGGAGCTCTGC | 2837 | TGG | + | UGCAAAUGCUGGAGCUCUGC | 5931 |
| AAATGCTGGAGCTCTGCTGG | 2838 | CGG | + | AAAUGCUGGAGCUCUGCUGG | 5932 |
| GGCGGAGTACCTGATATGCA | 2839 | AGG | + | GGCGGAGUACCUGAUAUGCA | 5933 |
| GATCTTCATCCTTGCATATC | 2840 | AGG | − | GAUCUUCAUCCUUGCAUAUC | 5934 |
| GCTTTTTTATTTGATTTCTG | 2841 | GGG | − | GCUUUUUUAUUUGAUUUCUG | 5935 |
| AGCTTTTTTATTTGATTTCT | 2842 | GGG | − | AGCUUUUUUAUUUGAUUUCU | 5936 |
| CAGCTTTTTTATTTGATTTC | 2843 | TGG | − | CAGCUUUUUUAUUUGAUUUC | 5937 |
| CAGAAATCAAATAAAAAAGC | 2844 | TGG | + | CAGAAAUCAAAUAAAAAAGC | 5938 |
| AGAAATCAAATAAAAAAGCT | 2845 | GGG | + | AGAAAUCAAAUAAAAAAGCU | 5939 |
| TAAAAAAGCTGGGCATAGTG | 2846 | AGG | + | UAAAAAAGCUGGGCAUAGUG | 5940 |
| AGCTGGGCATAGTGAGGAAG | 2847 | AGG | + | AGCUGGGCAUAGUGAGGAAG | 5941 |
| GCATAGTGAGGAAGAGGAGA | 2848 | TGG | + | GCAUAGUGAGGAAGAGGAGA | 5942 |
| CATAGTGAGGAAGAGGAGAT | 2849 | GGG | + | CAUAGUGAGGAAGAGGAGAU | 5943 |
| AGTGAGGAAGAGGAGATGGG | 2850 | AGG | + | AGUGAGGAAGAGGAGAUGGG | 5944 |
| AGGAGATGGGAGGATTCCTG | 2851 | TGG | + | AGGAGAUGGGAGGAUUCCUG | 5945 |
| GATGGGAGGATTCCTGTGGC | 2852 | TGG | + | GAUGGGAGGAUUCCUGUGGC | 5946 |
| GGAGGATTCCTGTGGCTGGC | 2853 | TGG | + | GGAGGAUUCCUGUGGCUGGC | 5947 |
| TTAGCTGTCCAGCCAGCCAC | 2854 | AGG | − | UUAGCUGUCCAGCCAGCCAC | 5948 |
| TGGAAATAGATGAATAGGCT | 2855 | AGG | − | UGGAAAUAGAUGAAUAGGCU | 5949 |
| TAGCCTATTCATCTATTTCC | 2856 | AGG | + | UAGCCUAUUCAUCUAUUUCC | 5950 |
| TGGCCTGGAAATAGATGAAT | 2857 | AGG | − | UGGCCUGGAAAUAGAUGAAU | 5951 |
| CATCTATTTCCAGGCCACTA | 2858 | AGG | + | CAUCUAUUUCCAGGCCACUA | 5952 |
| ATCTATTTCCAGGCCACTAA | 2859 | GGG | + | AUCUAUUUCCAGGCCACUAA | 5953 |
| ATTTCCAGGCCACTAAGGGA | 2860 | TGG | + | AUUUCCAGGCCACUAAGGGA | 5954 |
| GGTACCATCCCTTAGTGGCC | 2861 | TGG | − | GGUACCAUCCCUUAGUGGCC | 5955 |
| TTTAAGGTACCATCCCTTAG | 2862 | TGG | − | UUUAAGGUACCAUCCCUUAG | 5956 |
| ATTATTATTGTTATTTTTTA | 2863 | AGG | − | AUUAUUAUUGUUAUUUUUUA | 5957 |
| ACAATAATAATAAATAAAAA | 2864 | AGG | + | ACAAUAAUAAUAAAUAAAAA | 5958 |
| TAATAAATAAAAAAGGTAGC | 2865 | TGG | + | UAAUAAAUAAAAAAGGUAGC | 5959 |
| AAAAAGGTAGCTGGTTCCTG | 2866 | AGG | + | AAAAAGGUAGCUGGUUCCUG | 5960 |
| TGGTTCCTGAGGAGCATCTA | 2867 | AGG | + | UGGUUCCUGAGGAGCAUCUA | 5961 |
| GATATCCTTAGATGCTCCTC | 2868 | AGG | − | GAUAUCCUUAGAUGCUCCUC | 5962 |
| GTATGTGCACGTGGAGTTAA | 2869 | AGG | − | GUAUGUGCACGUGGAGUUAA | 5963 |
| GTATACAGTGTATGTGCACG | 2870 | TGG | − | GUAUACAGUGUAUGUGCACG | 5964 |
| TGCACATACACTGTATACAC | 2871 | AGG | + | UGCACAUACACUGUAUACAC | 5965 |
| TTTTTTTGGTAAAACTTGAT | 2872 | AGG | − | UUUUUUUGGUAAAACUUGAU | 5966 |
| TTTTTTTTTTTTTTTTTTTT | 2873 | TGG | − | UUUUUUUUUUUUUUUUUUUU | 5967 |
| AAGAACACTTTATTCACTGT | 2874 | TGG | + | AAGAACACUUUAUUCACUGU | 5968 |
| AACACTTTATTCACTGTTGG | 2875 | TGG | + | AACACUUUAUUCACUGUUGG | 5969 |
| ACACTTTATTCACTGTTGGT | 2876 | GGG | + | ACACUUUAUUCACUGUUGGU | 5970 |
| CTGTTGGTGGGTATGTAAAC | 2877 | TGG | + | CUGUUGGUGGGUAUGUAAAC | 5971 |
| CTCTGTGCTGATTTTCATAG | 2878 | TGG | − | CUCUGUGCUGAUUUUCAUAG | 5972 |
| CACTATGAAAATCAGCACAG | 2879 | AGG | + | CACUAUGAAAAUCAGCACAG | 5973 |
| TTGTTTTGTTGGAGTGGGAA | 2880 | GGG | − | UUGUUUUGUUGGAGUGGGAA | 5974 |
| TTTGTTTTGTTGGAGTGGGA | 2881 | AGG | − | UUUGUUUUGUUGGAGUGGGA | 5975 |
| TTGTTTTGTTTTGTTGGAGT | 2882 | GGG | − | UUGUUUUGUUUUGUUGGAGU | 5976 |
| TTTGTTTTGTTTTGTTGGAG | 2883 | TGG | − | UUUGUUUUGUUUUGUUGGAG | 5977 |
| TTTGTTTTGTTTTGTTTTGT | 2884 | TGG | − | UUUGUUUUGUUUUGUUUUGU | 5978 |
| GTTCTAGTTCTAGTTCTAGA | 2885 | GGG | − | GUUCUAGUUCUAGUUCUAGA | 5979 |
| AGTTCTAGTTCTAGTTCTAG | 2886 | AGG | − | AGUUCUAGUUCUAGUUCUAG | 5980 |
| CTAGAACTACTGCACGATCC | 2887 | AGG | + | CUAGAACUACUGCACGAUCC | 5981 |
| GATCCAGGTTTACCACTCCT | 2888 | AGG | + | GAUCCAGGUUUACCACUCCU | 5982 |
| ATACCTAGGAGTGGTAAACC | 2889 | TGG | − | AUACCUAGGAGUGGUAAACC | 5983 |
| TTTGAGTAAATACCTAGGAG | 2890 | TGG | − | UUUGAGUAAAUACCUAGGAG | 5984 |
| ACTCCTAGGTATTTACTCAA | 2891 | AGG | + | ACUCCUAGGUAUUUACUCAA | 5985 |
| AGTCCTTTGAGTAAATACCT | 2892 | AGG | − | AGUCCUUUGAGUAAAUACCU | 5986 |
| TATACGTCAACCTGTGACAG | 2893 | AGG | + | UAUACGUCAACCUGUGACAG | 5987 |
| GTATATGATGCCTCTGTCAC | 2894 | AGG | − | GUAUAUGAUGCCUCUGUCAC | 5988 |
| CAGAGGCATCATATACAAGC | 2895 | AGG | + | CAGAGGCAUCAUAUACAAGC | 5989 |
| AGAGGCATCATATACAAGCA | 2896 | GGG | + | AGAGGCAUCAUAUACAAGCA | 5990 |
| CATCATATACAAGCAGGGAG | 2897 | TGG | + | CAUCAUAUACAAGCAGGGAG | 5991 |
| CATATACAAGCAGGGAGTGG | 2898 | TGG | + | CAUAUACAAGCAGGGAGUGG | 5992 |
| TGAGGGGTGGGATTAAAGGC | 2899 | AGG | − | UGAGGGGUGGGAUUAAAGGC | 5993 |
| TGCCTTTAATCCCACCCCTC | 2900 | AGG | + | UGCCUUUAAUCCCACCCCUC | 5994 |
| CTCCTGAGGGGTGGGATTAA | 2901 | AGG | − | CUCCUGAGGGGUGGGAUUAA | 5995 |
| CTTTAATCCCACCCCTCAGG | 2902 | AGG | + | CUUUAAUCCCACCCCUCAGG | 5996 |
| GACTCTGCCTCCTGAGGGGT | 2903 | GGG | − | GACUCUGCCUCCUGAGGGGU | 5997 |
| TGACTCTGCCTCCTGAGGGG | 2904 | TGG | − | UGACUCUGCCUCCUGAGGGG | 5998 |
| ACCCCTCAGGAGGCAGAGTC | 2905 | AGG | + | ACCCCUCAGGAGGCAGAGUC | 5999 |
| ACCTGACTCTGCCTCCTGAG | 2906 | GGG | − | ACCUGACUCUGCCUCCUGAG | 6000 |
| TACCTGACTCTGCCTCCTGA | 2907 | GGG | − | UACCUGACUCUGCCUCCUGA | 6001 |
| CTACCTGACTCTGCCTCCTG | 2908 | AGG | − | CUACCUGACUCUGCCUCCUG | 6002 |
| GGTAGATCTCTGTGAGTTCG | 2909 | AGG | + | GGUAGAUCUCUGUGAGUUCG | 6003 |
| CTGTGAGTTCGAGGCCAGTT | 2910 | TGG | + | CUGUGAGUUCGAGGCCAGUU | 6004 |
| ACTCACTATGTAGACCAAAC | 2911 | TGG | − | ACUCACUAUGUAGACCAAAC | 6005 |
| CATATGGCTATATGGTCTTA | 2912 | TGG | − | CAUAUGGCUAUAUGGUCUUA | 6006 |
| CATAAGACCATATAGCCATA | 2913 | TGG | + | CAUAAGACCAUAUAGCCAUA | 6007 |
| AAGACCATATAGCCATATGG | 2914 | AGG | + | AAGACCAUAUAGCCAUAUGG | 6008 |
| AGACCATATAGCCATATGGA | 2915 | GGG | + | AGACCAUAUAGCCAUAUGGA | 6009 |
| GACCATATAGCCATATGGAG | 2916 | GGG | + | GACCAUAUAGCCAUAUGGAG | 6010 |
| ACCATATAGCCATATGGAGG | 2917 | GGG | + | ACCAUAUAGCCAUAUGGAGG | 6011 |
| CCATATAGCCATATGGAGGG | 2918 | GGG | + | CCAUAUAGCCAUAUGGAGGG | 6012 |
| CCCCCCTCCATATGGCTATA | 2919 | TGG | − | CCCCCCUCCAUAUGGCUAUA | 6013 |
| CTCACAATCCCCCCTCCATA | 2920 | TGG | − | CUCACAAUCCCCCCUCCAUA | 6014 |
| GAGAGAATTATTAAATGAAT | 2921 | TGG | + | GAGAGAAUUAUUAAAUGAAU | 6015 |
| TATACACTGTCTTCTTTCAT | 2922 | AGG | + | UAUACACUGUCUUCUUUCAU | 6016 |
| CATAGGAAAAATGAACAGAA | 2923 | AGG | + | CAUAGGAAAAAUGAACAGAA | 6017 |
| ATAGGAAAAATGAACAGAAA | 2924 | GGG | + | AUAGGAAAAAUGAACAGAAA | 6018 |
| AACAGAAAGGGAGAGATCTT | 2925 | TGG | + | AACAGAAAGGGAGAGAUCUU | 6019 |
| ACAGAAAGGGAGAGATCTTT | 2926 | GGG | + | ACAGAAAGGGAGAGAUCUUU | 6020 |
| GAAAGGGAGAGATCTTTGGG | 2927 | TGG | + | GAAAGGGAGAGAUCUUUGGG | 6021 |
| AAAGGGAGAGATCTTTGGGT | 2928 | GGG | + | AAAGGGAGAGAUCUUUGGGU | 6022 |
| AAGGGAGAGATCTTTGGGTG | 2929 | GGG | + | AAGGGAGAGAUCUUUGGGUG | 6023 |
| ATACATGACATGAAAGCAGA | 2930 | AGG | + | AUACAUGACAUGAAAGCAGA | 6024 |
| TACATGACATGAAAGCAGAA | 2931 | GGG | + | UACAUGACAUGAAAGCAGAA | 6025 |
| ACATGACATGAAAGCAGAAG | 2932 | GGG | + | ACAUGACAUGAAAGCAGAAG | 6026 |
| AGCAGAAGGGGATTAGTTAT | 2933 | TGG | + | AGCAGAAGGGGAUUAGUUAU | 6027 |
| GAAGGGGATTAGTTATTGGA | 2934 | AGG | + | GAAGGGGAUUAGUUAUUGGA | 6028 |
| GGGATTAGTTATTGGAAGGC | 2935 | AGG | + | GGGAUUAGUUAUUGGAAGGC | 6029 |
| GGATTAGTTATTGGAAGGCA | 2936 | GGG | + | GGAUUAGUUAUUGGAAGGCA | 6030 |
| TTAGTTATTGGAAGGCAGGG | 2937 | AGG | + | UUAGUUAUUGGAAGGCAGGG | 6031 |
| TAGTTATTGGAAGGCAGGGA | 2938 | GGG | + | UAGUUAUUGGAAGGCAGGGA | 6032 |
| TGGAAGGCAGGGAGGGACCC | 2939 | AGG | + | UGGAAGGCAGGGAGGGACCC | 6033 |
| AAGGCAGGGAGGGACCCAGG | 2940 | AGG | + | AAGGCAGGGAGGGACCCAGG | 6034 |
| GGAGGGACCCAGGAGGATGA | 2941 | AGG | + | GGAGGGACCCAGGAGGAUGA | 6035 |
| GAGGGACCCAGGAGGATGAA | 2942 | GGG | + | GAGGGACCCAGGAGGAUGAA | 6036 |
| TCTCTTCCCTTCATCCTCCT | 2943 | GGG | − | UCUCUUCCCUUCAUCCUCCU | 6037 |
| TTCTCTTCCCTTCATCCTCC | 2944 | TGG | − | UUCUCUUCCCUUCAUCCUCC | 6038 |
| GATGAAGGGAAGAGAATGCA | 2945 | AGG | + | GAUGAAGGGAAGAGAAUGCA | 6039 |
| ATGAAGGGAAGAGAATGCAA | 2946 | GGG | + | AUGAAGGGAAGAGAAUGCAA | 6040 |
| GGGAAGAGAATGCAAGGGAA | 2947 | AGG | + | GGGAAGAGAAUGCAAGGGAA | 6041 |
| AATGCAAGGGAAAGGAGTAA | 2948 | AGG | + | AAUGCAAGGGAAAGGAGUAA | 6042 |
| GCAAGGGAAAGGAGTAAAGG | 2949 | AGG | + | GCAAGGGAAAGGAGUAAAGG | 6043 |
| AGGGAAAGGAGTAAAGGAGG | 2950 | AGG | + | AGGGAAAGGAGUAAAGGAGG | 6044 |
| GAAAGGAGTAAAGGAGGAGG | 2951 | AGG | + | GAAAGGAGUAAAGGAGGAGG | 6045 |
| AGTAAAGGAGGAGGAGGTAG | 2952 | AGG | + | AGUAAAGGAGGAGGAGGUAG | 6046 |
| TATTAATTCCAGCACTTGTG | 2953 | AGG | + | UAUUAAUUCCAGCACUUGUG | 6047 |
| TAATTCCAGCACTTGTGAGG | 2954 | AGG | + | UAAUUCCAGCACUUGUGAGG | 6048 |
| AATTCCAGCACTTGTGAGGA | 2955 | GGG | + | AAUUCCAGCACUUGUGAGGA | 6049 |
| ATTCCAGCACTTGTGAGGAG | 2956 | GGG | + | AUUCCAGCACUUGUGAGGAG | 6050 |
| TGTCCCCTCCTCACAAGTGC | 2957 | TGG | − | UGUCCCCUCCUCACAAGUGC | 6051 |
| GACAGAGCTCTGTGAGTTCA | 2958 | AGG | + | GACAGAGCUCUGUGAGUUCA | 6052 |
| TGGAACTGACTATGCAGAGG | 2959 | GGG | − | UGGAACUGACUAUGCAGAGG | 6053 |
| CTGGAACTGACTATGCAGAG | 2960 | GGG | − | CUGGAACUGACUAUGCAGAG | 6054 |
| CCCTCTGCATAGTCAGTTCC | 2961 | AGG | + | CCCUCUGCAUAGUCAGUUCC | 6055 |
| CCTGGAACTGACTATGCAGA | 2962 | GGG | − | CCUGGAACUGACUAUGCAGA | 6056 |
| TCCTGGAACTGACTATGCAG | 2963 | AGG | − | UCCUGGAACUGACUAUGCAG | 6057 |
| GTCAGTTCCAGGATAGCCAA | 2964 | TGG | + | GUCAGUUCCAGGAUAGCCAA | 6058 |
| TATGTAGCCATTGGCTATCC | 2965 | TGG | − | UAUGUAGCCAUUGGCUAUCC | 6059 |
| GGGTCTCATTATGTAGCCAT | 2966 | TGG | − | GGGUCUCAUUAUGUAGCCAU | 6060 |
| ATGAGACCCTGTGTCAGAGA | 2967 | AGG | + | AUGAGACCCUGUGUCAGAGA | 6061 |
| AGACCCTGTGTCAGAGAAGG | 2968 | TGG | + | AGACCCUGUGUCAGAGAAGG | 6062 |
| CGGCCACCTTCTCTGACACA | 2969 | GGG | − | CGGCCACCUUCUCUGACACA | 6063 |
| CCTGTGTCAGAGAAGGTGGC | 2970 | CGG | + | CCUGUGUCAGAGAAGGUGGC | 6064 |
| CCGGCCACCTTCTCTGACAC | 2971 | AGG | − | CCGGCCACCUUCUCUGACAC | 6065 |
| GTCAGAGAAGGTGGCCGGCG | 2972 | AGG | + | GUCAGAGAAGGUGGCCGGCG | 6066 |
| TCAGAGAAGGTGGCCGGCGA | 2973 | GGG | + | UCAGAGAAGGUGGCCGGCGA | 6067 |
| TAAGCATCAATATCCCTCGC | 2974 | CGG | − | UAAGCAUCAAUAUCCCUCGC | 6068 |
| TAACTCATTCAGCTGTGTGG | 2975 | TGG | − | UAACUCAUUCAGCUGUGUGG | 6069 |
| GTTTAACTCATTCAGCTGTG | 2976 | TGG | − | GUUUAACUCAUUCAGCUGUG | 6070 |
| AGTGCAAAAGTAGCAGGAAC | 2977 | AGG | − | AGUGCAAAAGUAGCAGGAAC | 6071 |
| ATTGAAAGTGCAAAAGTAGC | 2978 | AGG | − | AUUGAAAGUGCAAAAGUAGC | 6072 |
| ATGCTCCCAGATTACTTACA | 2979 | TGG | + | AUGCUCCCAGAUUACUUACA | 6073 |
| AAATTCCATGTAAGTAATCT | 2980 | GGG | − | AAAUUCCAUGUAAGUAAUCU | 6074 |
| TAAATTCCATGTAAGTAATC | 2981 | TGG | − | UAAAUUCCAUGUAAGUAAUC | 6075 |
| ATGGAATTTATATTTTATTG | 2982 | TGG | + | AUGGAAUUUAUAUUUUAUUG | 6076 |
| GAGGTTTGTCTATGATGTAC | 2983 | AGG | − | GAGGUUUGUCUAUGAUGUAC | 6077 |
| TTGGTTGAAAATTTTTCTTG | 2984 | AGG | − | UUGGUUGAAAAUUUUUCUUG | 6078 |
| AAATTTTCAACCAATAGTCC | 2985 | AGG | + | AAAUUUUCAACCAAUAGUCC | 6079 |
| GTTATTTTTGCCTGGACTAT | 2986 | TGG | − | GUUAUUUUUGCCUGGACUAU | 6080 |
| AAAAAGAGGTTATTTTTGCC | 2987 | TGG | − | AAAAAGAGGUUAUUUUUGCC | 6081 |
| AGAAAGAAAGAAAGAAAAAG | 2988 | AGG | − | AGAAAGAAAGAAAGAAAAAG | 6082 |
| TCTTTTTTTTTTTTTTTTTT | 2989 | TGG | + | UCUUUUUUUUUUUUUUUUUU | 6083 |
| TTTTTTTGGTTTTTTGAAAC | 2990 | AGG | + | UUUUUUUGGUUUUUUGAAAC | 6084 |
| TTTTTTGGTTTTTTGAAACA | 2991 | GGG | + | UUUUUUGGUUUUUUGAAACA | 6085 |
| AGGGTTTCTCTGTATAGCCC | 2992 | TGG | + | AGGGUUUCUCUGUAUAGCCC | 6086 |
| CTGTATAGCCCTGGCTGTCC | 2993 | TGG | + | CUGUAUAGCCCUGGCUGUCC | 6087 |
| AGTGAGTTCCAGGACAGCCA | 2994 | GGG | − | AGUGAGUUCCAGGACAGCCA | 6088 |
| AAGTGAGTTCCAGGACAGCC | 2995 | AGG | − | AAGUGAGUUCCAGGACAGCC | 6089 |
| TGGTGTACAAAGTGAGTTCC | 2996 | AGG | − | UGGUGUACAAAGUGAGUUCC | 6090 |
| TGGAACTCACTTTGTACACC | 2997 | AGG | + | UGGAACUCACUUUGUACACC | 6091 |
| ACTCACTTTGTACACCAGGC | 2998 | TGG | + | ACUCACUUUGUACACCAGGC | 6092 |
| TTCTGAGTTCGAGGCCAGCC | 2999 | TGG | − | UUCUGAGUUCGAGGCCAGCC | 6093 |
| CAGGTGGATTTCTGAGTTCG | 3000 | AGG | − | CAGGUGGAUUUCUGAGUUCG | 6094 |
| ACTCGGGAGGCAGAGGCAGG | 3001 | TGG | − | ACUCGGGAGGCAGAGGCAGG | 6095 |
| AGCACTCGGGAGGCAGAGGC | 3002 | AGG | − | AGCACUCGGGAGGCAGAGGC | 6096 |
| GCCTCTGCCTCCCGAGTGCT | 3003 | CGG | + | GCCUCUGCCUCCCGAGUGCU | 6097 |
| TCCGAGCACTCGGGAGGCAG | 3004 | AGG | − | UCCGAGCACUCGGGAGGCAG | 6098 |
| CTTTAATCCGAGCACTCGGG | 3005 | AGG | − | CUUUAAUCCGAGCACUCGGG | 6099 |
| CTCCCGAGTGCTCGGATTAA | 3006 | AGG | + | CUCCCGAGUGCUCGGAUUAA | 6100 |
| CGCCTTTAATCCGAGCACTC | 3007 | GGG | − | CGCCUUUAAUCCGAGCACUC | 6101 |
| ACGCCTTTAATCCGAGCACT | 3008 | CGG | − | ACGCCUUUAAUCCGAGCACU | 6102 |
| TATTTTTTGCGGGACGGTGG | 3009 | TGG | − | UAUUUUUUGCGGGACGGUGG | 6103 |
| GGTTATTTTTTGCGGGACGG | 3010 | TGG | − | GGUUAUUUUUUGCGGGACGG | 6104 |
| ACAGGTTATTTTTTGCGGGA | 3011 | CGG | − | ACAGGUUAUUUUUUGCGGGA | 6105 |
| AAAAACAGGTTATTTTTTGC | 3012 | GGG | − | AAAAACAGGUUAUUUUUUGC | 6106 |
| CAAAAACAGGTTATTTTTTG | 3013 | CGG | − | CAAAAACAGGUUAUUUUUUG | 6107 |
| ATAATTAAAACAACAAAAAC | 3014 | AGG | − | AUAAUUAAAACAACAAAAAC | 6108 |
| TTTTTAAGATTTTATGTGTA | 3015 | TGG | + | UUUUUAAGAUUUUAUGUGUA | 6109 |
| TTTTAAGATTTTATGTGTAT | 3016 | GGG | + | UUUUAAGAUUUUAUGUGUAU | 6110 |
| CTGTGTACCACTTGTATGCT | 3017 | TGG | + | CUGUGUACCACUUGUAUGCU | 6111 |
| TTGGGCACCAAGCATACAAG | 3018 | TGG | − | UUGGGCACCAAGCAUACAAG | 6112 |
| TGTATGCTTGGTGCCCAAGA | 3019 | AGG | + | UGUAUGCUUGGUGCCCAAGA | 6113 |
| TGATCTGTTCTGTCCTTCTT | 3020 | GGG | − | UGAUCUGUUCUGUCCUUCUU | 6114 |
| ATGATCTGTTCTGTCCTTCT | 3021 | TGG | − | AUGAUCUGUUCUGUCCUUCU | 6115 |
| AGAAGGACAGAACAGATCAT | 3022 | AGG | + | AGAAGGACAGAACAGAUCAU | 6116 |
| GAAGGACAGAACAGATCATA | 3023 | GGG | + | GAAGGACAGAACAGAUCAUA | 6117 |
| GAACAGATCATAGGGTTTCC | 3024 | TGG | + | GAACAGAUCAUAGGGUUUCC | 6118 |
| AACAGATCATAGGGTTTCCT | 3025 | GGG | + | AACAGAUCAUAGGGUUUCCU | 6119 |
| TTTCCTGGGATAAGAGTTAT | 3026 | AGG | + | UUUCCUGGGAUAAGAGUUAU | 6120 |
| ACTCCTATAACTCTTATCCC | 3027 | AGG | − | ACUCCUAUAACUCUUAUCCC | 6121 |
| GATGACTGTAAGCCACCAAG | 3028 | TGG | + | GAUGACUGUAAGCCACCAAG | 6122 |
| GTAAGCCACCAAGTGGACGC | 3029 | TGG | + | GUAAGCCACCAAGUGGACGC | 6123 |
| TAAGCCACCAAGTGGACGCT | 3030 | GGG | + | UAAGCCACCAAGUGGACGCU | 6124 |
| AATTCCCAGCGTCCACTTGG | 3031 | TGG | − | AAUUCCCAGCGUCCACUUGG | 6125 |
| TTCAATTCCCAGCGTCCACT | 3032 | TGG | − | UUCAAUUCCCAGCGUCCACU | 6126 |
| GGACGCTGGGAATTGAACCT | 3033 | TGG | + | GGACGCUGGGAAUUGAACCU | 6127 |
| GGAATTGAACCTTGGTTAGC | 3034 | TGG | + | GGAAUUGAACCUUGGUUAGC | 6128 |
| GACACTCTTCCAGCTAACCA | 3035 | AGG | − | GACACUCUUCCAGCUAACCA | 6129 |
| GGGACTGGAATTAAAAATAC | 3036 | TGG | − | GGGACUGGAAUUAAAAAUAC | 6130 |
| CATAGACAAACAACGGGGAC | 3037 | TGG | − | CAUAGACAAACAACGGGGAC | 6131 |
| ATCTTCATAGACAAACAACG | 3038 | GGG | − | AUCUUCAUAGACAAACAACG | 6132 |
| AATCTTCATAGACAAACAAC | 3039 | GGG | − | AAUCUUCAUAGACAAACAAC | 6133 |
| AAATCTTCATAGACAAACAA | 3040 | CGG | − | AAAUCUUCAUAGACAAACAA | 6134 |
| TTGTCTATGAAGATTTTGCT | 3041 | TGG | + | UUGUCUAUGAAGAUUUUGCU | 6135 |
| TTTTGCTTGGTAGTCCAGTC | 3042 | TGG | + | UUUUGCUUGGUAGUCCAGUC | 6136 |
| CCAGTCTGGCTTTAAGAAAC | 3043 | AGG | + | CCAGUCUGGCUUUAAGAAAC | 6137 |
| CCTGTTTCTTAAAGCCAGAC | 3044 | TGG | − | CCUGUUUCUUAAAGCCAGAC | 6138 |
| CAGTCTGGCTTTAAGAAACA | 3045 | GGG | + | CAGUCUGGCUUUAAGAAACA | 6139 |
| AACAGGGTCTCATGCATCCC | 3046 | TGG | + | AACAGGGUCUCAUGCAUCCC | 6140 |
| ATGGAAGTCTGAGCAAGCCA | 3047 | GGG | − | AUGGAAGUCUGAGCAAGCCA | 6141 |
| CATGGAAGTCTGAGCAAGCC | 3048 | AGG | − | CAUGGAAGUCUGAGCAAGCC | 6142 |
| CTCAGACTTCCATGCAGCTG | 3049 | AGG | + | CUCAGACUUCCAUGCAGCUG | 6143 |
| GACTTCCATGCAGCTGAGGA | 3050 | TGG | + | GACUUCCAUGCAGCUGAGGA | 6144 |
| TAAAGCCATCCTCAGCTGCA | 3051 | TGG | − | UAAAGCCAUCCUCAGCUGCA | 6145 |
| TCTACGAGGAAAAGGCAGGA | 3052 | GGG | − | UCUACGAGGAAAAGGCAGGA | 6146 |
| CTCTACGAGGAAAAGGCAGG | 3053 | AGG | − | CUCUACGAGGAAAAGGCAGG | 6147 |
| GCACTCTACGAGGAAAAGGC | 3054 | AGG | − | GCACUCUACGAGGAAAAGGC | 6148 |
| CTCAGCACTCTACGAGGAAA | 3055 | AGG | − | CUCAGCACUCUACGAGGAAA | 6149 |
| TGTAATCTCAGCACTCTACG | 3056 | AGG | − | UGUAAUCUCAGCACUCUACG | 6150 |
| GAGAAGTCTGCTGGTGGCAC | 3057 | AGG | − | GAGAAGUCUGCUGGUGGCAC | 6151 |
| TGTTAGGAGAAGTCTGCTGG | 3058 | TGG | − | UGUUAGGAGAAGUCUGCUGG | 6152 |
| TCTTGTTAGGAGAAGTCTGC | 3059 | TGG | − | UCUUGUUAGGAGAAGUCUGC | 6153 |
| GACTTCTCCTAACAAGAATG | 3060 | TGG | + | GACUUCUCCUAACAAGAAUG | 6154 |
| TCCTAACAAGAATGTGGCAC | 3061 | AGG | + | UCCUAACAAGAAUGUGGCAC | 6155 |
| CCTAACAAGAATGTGGCACA | 3062 | GGG | + | CCUAACAAGAAUGUGGCACA | 6156 |
| CCCTGTGCCACATTCTTGTT | 3063 | AGG | − | CCCUGUGCCACAUUCUUGUU | 6157 |
| AACAAGAATGTGGCACAGGG | 3064 | AGG | + | AACAAGAAUGUGGCACAGGG | 6158 |
| ATGTGGCACAGGGAGGCAAC | 3065 | TGG | + | AUGUGGCACAGGGAGGCAAC | 6159 |
| TGTGGCACAGGGAGGCAACT | 3066 | GGG | + | UGUGGCACAGGGAGGCAACU | 6160 |
| GAGGCAACTGGGAATCAAAC | 3067 | AGG | + | GAGGCAACUGGGAAUCAAAC | 6161 |
| CAACTGGGAATCAAACAGGA | 3068 | AGG | + | CAACUGGGAAUCAAACAGGA | 6162 |
| CTGGGAATCAAACAGGAAGG | 3069 | AGG | + | CUGGGAAUCAAACAGGAAGG | 6163 |
| AAACAGGAAGGAGGAGTAAA | 3070 | AGG | + | AAACAGGAAGGAGGAGUAAA | 6164 |
| AGGAAGGAGGAGTAAAAGGA | 3071 | AGG | + | AGGAAGGAGGAGUAAAAGGA | 6165 |
| GGAAGGAGGAGTAAAAGGAA | 3072 | GGG | + | GGAAGGAGGAGUAAAAGGAA | 6166 |
| GAAGGAGGAGTAAAAGGAAG | 3073 | GGG | + | GAAGGAGGAGUAAAAGGAAG | 6167 |
| GGAGGAGTAAAAGGAAGGGG | 3074 | AGG | + | GGAGGAGUAAAAGGAAGGGG | 6168 |
| GAGTAAAAGGAAGGGGAGGA | 3075 | AGG | + | GAGUAAAAGGAAGGGGAGGA | 6169 |
| AAAGGAAGGGGAGGAAGGAG | 3076 | AGG | + | AAAGGAAGGGGAGGAAGGAG | 6170 |
| GGGAGGAAGGAGAGGAGAAG | 3077 | TGG | + | GGGAGGAAGGAGAGGAGAAG | 6171 |
| GGAAGGAGAGGAGAAGTGGC | 3078 | AGG | + | GGAAGGAGAGGAGAAGUGGC | 6172 |
| AGGAGAGGAGAAGTGGCAGG | 3079 | AGG | + | AGGAGAGGAGAAGUGGCAGG | 6173 |
| GTGGCAGGAGGAGAAGAAAA | 3080 | AGG | + | GUGGCAGGAGGAGAAGAAAA | 6174 |
| GCAGGAGGAGAAGAAAAAGG | 3081 | AGG | + | GCAGGAGGAGAAGAAAAAGG | 6175 |
| GGAGGAGAAGAAAAAGGAGG | 3082 | CGG | + | GGAGGAGAAGAAAAAGGAGG | 6176 |
| AGAAAAAGGAGGCGGAGAAA | 3083 | AGG | + | AGAAAAAGGAGGCGGAGAAA | 6177 |
| AAAAGGAGGCGGAGAAAAGG | 3084 | TGG | + | AAAAGGAGGCGGAGAAAAGG | 6178 |
| AGGCGGAGAAAAGGTGGTAG | 3085 | TGG | + | AGGCGGAGAAAAGGUGGUAG | 6179 |
| CGGAGAAAAGGTGGTAGTGG | 3086 | TGG | + | CGGAGAAAAGGUGGUAGUGG | 6180 |
| AGAAAAGGTGGTAGTGGTGG | 3087 | AGG | + | AGAAAAGGUGGUAGUGGUGG | 6181 |
| GGTGGTAGTGGTGGAGGAAG | 3088 | AGG | + | GGUGGUAGUGGUGGAGGAAG | 6182 |
| GGTAGTGGTGGAGGAAGAGG | 3089 | AGG | + | GGUAGUGGUGGAGGAAGAGG | 6183 |
| AGTGGTGGAGGAAGAGGAGG | 3090 | AGG | + | AGUGGUGGAGGAAGAGGAGG | 6184 |
| GGTGGAGGAAGAGGAGGAGG | 3091 | AGG | + | GGUGGAGGAAGAGGAGGAGG | 6185 |
| GGAGGAAGAGGAGGAGGAGG | 3092 | AGG | + | GGAGGAAGAGGAGGAGGAGG | 6186 |
| GGAAGAGGAGGAGGAGGAGG | 3093 | AGG | + | GGAAGAGGAGGAGGAGGAGG | 6187 |
| AGAGGAGGAGGAGGAGGAGG | 3094 | AGG | + | AGAGGAGGAGGAGGAGGAGG | 6188 |
| GGAGGAGGAGGAGGAGGAGG | 3095 | AGG | + | GGAGGAGGAGGAGGAGGAGG | 6189 |
| GGAGGAGGAGGAGGAGGAGG | 3096 | AGG | + | GGAGGAGGAGGAGGAGGAGG | 6190 |
| GAGGAGGAGGAGGAGGAGGA | 3097 | GGG | + | GAGGAGGAGGAGGAGGAGGA | 6191 |
| AGGAGGAGGAGGAGGAGGAG | 3098 | GGG | + | AGGAGGAGGAGGAGGAGGAG | 6192 |
| GGAGGAGGAGGAGGAGGAGG | 3099 | GGG | + | GGAGGAGGAGGAGGAGGAGG | 6193 |
| GAGGGGGACTTAATCAGTAA | 3100 | AGG | + | GAGGGGGACUUAAUCAGUAA | 6194 |
| ACTTAATCAGTAAAGGAAAA | 3101 | AGG | + | ACUUAAUCAGUAAAGGAAAA | 6195 |
| AAAAGGCTGAGCTCAGTCCT | 3102 | TGG | + | AAAAGGCUGAGCUCAGUCCU | 6196 |
| CTCAGTCCTTGGAACCTACA | 3103 | TGG | + | CUCAGUCCUUGGAACCUACA | 6197 |
| GTCCTTGGAACCTACATGGT | 3104 | AGG | + | GUCCUUGGAACCUACAUGGU | 6198 |
| CTCCTACCATGTAGGTTCCA | 3105 | AGG | − | CUCCUACCAUGUAGGUUCCA | 6199 |
| CTCATTCTCTCCTACCATGT | 3106 | AGG | − | CUCAUUCUCUCCUACCAUGU | 6200 |
| GTTTCCTCTGATCCCCACAC | 3107 | TGG | + | GUUUCCUCUGAUCCCCACAC | 6201 |
| TGCTCCAGTGTGGGGATCAG | 3108 | AGG | − | UGCUCCAGUGUGGGGAUCAG | 6202 |
| TGATCCCCACACTGGAGCAA | 3109 | TGG | + | UGAUCCCCACACUGGAGCAA | 6203 |
| GGCACCATTGCTCCAGTGTG | 3110 | GGG | − | GGCACCAUUGCUCCAGUGUG | 6204 |
| TGGCACCATTGCTCCAGTGT | 3111 | GGG | − | UGGCACCAUUGCUCCAGUGU | 6205 |
| ATGGCACCATTGCTCCAGTG | 3112 | TGG | − | AUGGCACCAUUGCUCCAGUG | 6206 |
| GAAGTGGGAGAGTGATGTGA | 3113 | TGG | − | GAAGUGGGAGAGUGAUGUGA | 6207 |
| TGTGAGGAGTTGGGTGAAGT | 3114 | GGG | − | UGUGAGGAGUUGGGUGAAGU | 6208 |
| TTGTGAGGAGTTGGGTGAAG | 3115 | TGG | − | UUGUGAGGAGUUGGGUGAAG | 6209 |
| TTTTATTTTTGTGAGGAGTT | 3116 | GGG | − | UUUUAUUUUUGUGAGGAGUU | 6210 |
| TTTTTATTTTTGTGAGGAGT | 3117 | TGG | − | UUUUUAUUUUUGUGAGGAGU | 6211 |
| TTTTGTTTTTTATTTTTGTG | 3118 | AGG | − | UUUUGUUUUUUAUUUUUGUG | 6212 |
| TTAAAAAAGAAAGCTGTAGC | 3119 | CGG | + | UUAAAAAAGAAAGCUGUAGC | 6213 |
| TAAAAAAGAAAGCTGTAGCC | 3120 | GGG | + | UAAAAAAGAAAGCUGUAGCC | 6214 |
| AAGAAAGCTGTAGCCGGGCG | 3121 | TGG | + | AAGAAAGCUGUAGCCGGGCG | 6215 |
| AAAGCTGTAGCCGGGCGTGG | 3122 | TGG | + | AAAGCUGUAGCCGGGCGUGG | 6216 |
| AAAGTGTGTGCCACCACGCC | 3123 | CGG | − | AAAGUGUGUGCCACCACGCC | 6217 |
| GTGGCACACACTTTTAATCC | 3124 | CGG | + | GUGGCACACACUUUUAAUCC | 6218 |
| ACACTTTTAATCCCGGCACT | 3125 | TGG | + | ACACUUUUAAUCCCGGCACU | 6219 |
| CACTTTTAATCCCGGCACTT | 3126 | GGG | + | CACUUUUAAUCCCGGCACUU | 6220 |
| TTTTAATCCCGGCACTTGGG | 3127 | AGG | + | UUUUAAUCCCGGCACUUGGG | 6221 |
| TCCCGGCACTTGGGAGGCAG | 3128 | AGG | + | UCCCGGCACUUGGGAGGCAG | 6222 |
| GCCTCTGCCTCCCAAGTGCC | 3129 | GGG | − | GCCUCUGCCUCCCAAGUGCC | 6223 |
| TGCCTCTGCCTCCCAAGTGC | 3130 | CGG | − | UGCCUCUGCCUCCCAAGUGC | 6224 |
| ACTTGGGAGGCAGAGGCAAG | 3131 | CGG | + | ACUUGGGAGGCAGAGGCAAG | 6225 |
| CAAGCGGATTTCTGAGTTCG | 3132 | AGG | + | CAAGCGGAUUUCUGAGUUCG | 6226 |
| TTCTGAGTTCGAGGCCAGCT | 3133 | TGG | + | UUCUGAGUUCGAGGCCAGCU | 6227 |
| ACTCACTTTGTAGACCAAGC | 3134 | TGG | − | ACUCACUUUGUAGACCAAGC | 6228 |
| TGGTCTACAAAGTGAGTTCC | 3135 | AGG | + | UGGUCUACAAAGUGAGUUCC | 6229 |
| AAGTGAGTTCCAGGACAGCC | 3136 | AGG | + | AAGUGAGUUCCAGGACAGCC | 6230 |
| AGTGAGTTCCAGGACAGCCA | 3137 | GGG | + | AGUGAGUUCCAGGACAGCCA | 6231 |
| CTGTGTAGCCCTGGCTGTCC | 3138 | TGG | − | CUGUGUAGCCCUGGCUGUCC | 6232 |
| AGGGTTTCTCTGTGTAGCCC | 3139 | TGG | − | AGGGUUUCUCUGUGUAGCCC | 6233 |
| TCTTTTGGTTTTTCAAGACA | 3140 | GGG | − | UCUUUUGGUUUUUCAAGACA | 6234 |
| TTCTTTTGGTTTTTCAAGAC | 3141 | AGG | − | UUCUUUUGGUUUUUCAAGAC | 6235 |
| ACAGCTTTCTTTTTTTCTTT | 3142 | TGG | − | ACAGCUUUCUUUUUUUCUUU | 6236 |
| TATATTAATATAGCAAAGCA | 3143 | GGG | − | UAUAUUAAUAUAGCAAAGCA | 6237 |
| ATATATTAATATAGCAAAGC | 3144 | AGG | − | AUAUAUUAAUAUAGCAAAGC | 6238 |
| TGTTTTTTCTTATAGAATTA | 3145 | TGG | − | UGUUUUUUCUUAUAGAAUUA | 6239 |
| TTCTGGAGGGAGGAAAAGGA | 3146 | TGG | − | UUCUGGAGGGAGGAAAAGGA | 6240 |
| CTCATTCTGGAGGGAGGAAA | 3147 | AGG | − | CUCAUUCUGGAGGGAGGAAA | 6241 |

### B. Other Nuclease Agents and Target Sequences for Nuclease Agents

[0305] Any nuclease agent that induces a nick or double-strand break at a desired target sequence can be used in the methods and compositions disclosed herein. A naturally occurring or native nuclease agent can be employed so long as the nuclease agent induces a nick or double-strand break at a desired target sequence. Alternatively, a modified or engineered nuclease agent can be employed. An “engineered nuclease agent” includes a nuclease that is engineered (modified or derived) from its native form to specifically recognize and induce a nick or double-strand break in the desired target sequence. Thus, an engineered nuclease agent can be derived from a native, naturally occurring nuclease agent or it can be artificially created or synthesized. The engineered nuclease can induce a nick or double-strand break in a target sequence, for example, wherein the target sequence is not a sequence that would have been recognized by a native (non-engineered or non-modified) nuclease agent. The modification of the nuclease agent can be as little as one amino acid in a protein cleavage agent or one nucleotide in a nucleic acid cleavage agent. Producing a nick or double-strand break at a target sequence or other DNA can be referred to herein as “cutting” or “cleaving” the target sequence or other DNA.

[0306] Active variants and fragments of the exemplified target sequences are also provided. Such active variants can comprise at least 65%, 70%, 75%, 80%, 85%, 90%, 91%, 92%, 93%, 94%, 95%, 96%, 97%, 98%, 99% or more sequence identity to the given target sequence, wherein the active variants retain biological activity and hence are capable of being recognized and cleaved by a nuclease agent in a sequence-specific manner. Assays to measure the double-strand break of a target sequence by a nuclease agent are well-known. See, e.g., Frendewey et al. (2010) Methods in Enzymology 476:295-307, which is herein incorporated by reference herein in its entirety for all purposes.

[0307] The target sequence of the nuclease agent can be positioned anywhere in or near the target locus. The target sequence can be located within a coding region of a gene, or within regulatory regions that influence the expression of the gene. A target sequence of the nuclease agent can be located in an intron, an exon, a promoter, an enhancer, a regulatory region, or any non-protein coding region.

[0308] One type of nuclease agent is a Transcription Activator-Like Effector Nuclease (TALEN). TAL effector nucleases are a class of sequence-specific nucleases that can be used to make double-strand breaks at specific target sequences in the genome of a prokaryotic or eukaryotic organism. TAL effector nucleases are created by fusing a native or engineered transcription activator-like (TAL) effector, or functional part thereof, to the catalytic domain of an endonuclease, such as, for example, FokI. The unique, modular TAL effector DNA binding domain allows for the design of proteins with potentially any given DNA recognition specificity. Thus, the DNA binding domains of the TAL effector nucleases can be engineered to recognize specific DNA target sites and thus, used to make double-strand breaks at desired target sequences. See WO 2010/079430; Morbitzer et al. (2010) Proc. Natl. Acad. Sci. U.S.A. 107(50):21617-21622; Scholze & Boch (2010) Virulence 1:428-432; Christian et al. Genetics (2010) 186:757-761; Li et al. (2010) Nucleic Acids Res. (2010) doi:10.1093/nar/gkq704; and Miller et al. (2011) Nat. Biotechnol. 29:143-148, each of which is herein incorporated by reference in its entirety for all purposes.

[0309] Examples of suitable TAL nucleases, and methods for preparing suitable TAL nucleases, are disclosed, e.g., in US 2011/0239315 A1, US 2011/0269234 A1, US 2011/0145940 A1, US 2003/0232410 A1, US 2005/0208489 A1, US 2005/0026157 A1, US 2005/0064474 A1, US 2006/0188987 A1, and US 2006/0063231 A1, each of which is herein incorporated by reference in its entirety for all purposes. In various embodiments, TAL effector nucleases are engineered that cut in or near a target nucleic acid sequence in, e.g., a locus of interest or a genomic locus of interest, wherein the target nucleic acid sequence is at or near a sequence to be modified by a targeting vector. The TAL nucleases suitable for use with the various methods and compositions provided herein include those that are specifically designed to bind at or near target nucleic acid sequences to be modified by targeting vectors as described herein.

[0310] In some TALENs, each monomer of the TALEN comprises 33-35 TAL repeats that recognize a single base pair via two hypervariable residues. In some TALENs, the nuclease agent is a chimeric protein comprising a TAL-repeat-based DNA binding domain operably linked to an independent nuclease such as a FokI endonuclease. For example, the nuclease agent can comprise a first TAL-repeat-based DNA binding domain and a second TAL-repeat-based DNA binding domain, wherein each of the first and the second TAL-repeat-based DNA binding domains is operably linked to a FokI nuclease, wherein the first and the second TAL-repeat-based DNA binding domain recognize two contiguous target DNA sequences in each strand of the target DNA sequence separated by a spacer sequence of varying length (12-20 bp), and wherein the FokI nuclease subunits dimerize to create an active nuclease that makes a double strand break at a target sequence.

[0311] The nuclease agent employed in the various methods and compositions disclosed herein can further comprise a zinc-finger nuclease (ZFN). In some ZFNs, each monomer of the ZFN comprises 3 or more zinc finger-based DNA binding domains, wherein each zinc finger-based DNA binding domain binds to a 3 bp subsite. In other ZFNs, the ZFN is a chimeric protein comprising a zinc finger-based DNA binding domain operably linked to an independent nuclease such as a FokI endonuclease. For example, the nuclease agent can comprise a first ZFN and a second ZFN, wherein each of the first ZFN and the second ZFN is operably linked to a FokI nuclease subunit, wherein the first and the second ZFN recognize two contiguous target DNA sequences in each strand of the target DNA sequence separated by about 5-7 bp spacer, and wherein the FokI nuclease subunits dimerize to create an active nuclease that makes a double strand break. See, e.g., US20060246567; US20080182332; US20020081614; US20030021776; WO/2002/057308A2; US20130123484; US20100291048; WO/2011/017293A2; and Gaj et al. (2013) Trends Biotechnol., 31(7):397-405, each of which is herein incorporated by reference in its entirety for all purposes.

[0312] Active variants and fragments of nuclease agents (i.e., an engineered nuclease agent) are also provided. Such active variants can comprise at least 65%, 70%, 75%, 80%, 85%, 90%, 91%, 92%, 93%, 94%, 95%, 96%, 97%, 98%, 99% or more sequence identity to the native nuclease agent, wherein the active variants retain the ability to cut at a desired target sequence and hence retain nick or double-strand-break-inducing activity. For example, any of the nuclease agents described herein can be modified from a native endonuclease sequence and designed to recognize and induce a nick or double-strand break at a target sequence that was not recognized by the native nuclease agent. Thus, some engineered nucleases have a specificity to induce a nick or double-strand break at a target sequence that is different from the corresponding native nuclease agent target sequence. Assays for nick or double-strand-break-inducing activity are known and generally measure the overall activity and specificity of the endonuclease on DNA substrates containing the target sequence.

[0313] The nuclease agent may be introduced into the cell or animal by any known means. A polypeptide encoding the nuclease agent may be directly introduced into the cell or animal. Alternatively, a polynucleotide encoding the nuclease agent can be introduced into the cell or animal. When a polynucleotide encoding the nuclease agent is introduced, the nuclease agent can be transiently, conditionally, or constitutively expressed within the cell. The polynucleotide encoding the nuclease agent can be contained in an expression cassette and be operably linked to a conditional promoter, an inducible promoter, a constitutive promoter, or a tissue-specific promoter. Examples of promoters are discussed in further detail elsewhere herein. Alternatively, the nuclease agent can be introduced into the cell as an mRNA encoding the nuclease agent.

[0314] A polynucleotide encoding a nuclease agent can be stably integrated in the genome of a cell and operably linked to a promoter active in the cell. Alternatively, a polynucleotide encoding a nuclease agent can be in an expression vector or a targeting vector.

[0315] When the nuclease agent is provided to the cell through the introduction of a polynucleotide encoding the nuclease agent, such a polynucleotide encoding a nuclease agent can be modified to substitute codons having a higher frequency of usage in the cell of interest, as compared to the naturally occurring polynucleotide sequence encoding the nuclease agent. For example, the polynucleotide encoding the nuclease agent can be modified to substitute codons having a higher frequency of usage in a given eukaryotic cell of interest, including a human cell, a non-human cell, a mammalian cell, a rodent cell, a mouse cell, a rat cell or any other host cell of interest, as compared to the naturally occurring polynucleotide sequence.

[0316] The term “target sequence for a nuclease agent” includes a DNA sequence at which a nick or double-strand break is induced by a nuclease agent. The target sequence for a nuclease agent can be endogenous (or native) to the cell or the target sequence can be exogenous to the cell. A target sequence that is exogenous to the cell is not naturally occurring in the genome of the cell. The target sequence can also exogenous to the polynucleotides of interest that one desires to be positioned at the target locus. In some cases, the target sequence is present only once in the genome of the host cell.

[0317] The length of the target sequence can vary, and includes, for example, target sequences that are about 30-36 bp for a zinc finger nuclease (ZFN) pair (i.e., about 15-18 bp for each ZFN), about 36 bp for a Transcription Activator-Like Effector Nuclease (TALEN), or about 20 bp for a CRISPR/Cas9 guide RNA.

### VI. Cells or Animals or Genomes Comprising Nucleic Acid Constructs and/or Nuclease Agents or Nucleic Acids Encoding Nuclease Agents

[0318] Genomes, cells, and animals produced by the methods disclosed herein are also provided. Likewise, genomes, cells, and animals comprising the nucleic acid constructs comprising a retinoschisin coding sequence (i.e., encoding a retinoschisin protein or fragment or variant thereof) for integration into and expression from a target genomic locus, vectors, lipid nanoparticles, or compositions as described herein are also provided. Likewise, genomes, cells, and animals comprising the described nuclease agents or nucleic acids encoding the nuclease agents (e.g., targeting an endogenous RS1 locus) or vectors, lipid nanoparticles, or compositions as described herein are also provided. The genomes, cells, or animals can comprise the nucleic acid construct genomically integrated at a target genomic locus (e.g., at an RS1 locus) and can express the retinoschisin protein or fragment or variant thereof. The retinoschisin coding sequence can be operably linked to an endogenous promoter at the target genomic locus upon integration into the target genomic locus, or it can be operably linked to an exogenous promoter present in the nucleic acid construct. If the nucleic acid construct is a bidirectional nucleic acid construct disclosed herein, the genome, cell, or animal can express the first retinoschisin protein or fragment or variant thereof or can express the second retinoschisin protein or fragment or variant thereof. In some genomes, cells, or animals, the target genomic locus is an RS1 locus. For example, the nucleic acid construct can be genomically integrated in intron 1 of the endogenous RS1 locus. Endogenous RS1 exon 1 can then splice into the coding sequence for the retinoschisin protein or fragment or variant thereof in the nucleic acid construct. In a specific example, the modified RS1 locus comprising the genomically integrated nucleic acid construct encodes a protein comprising, consisting essentially of, or consisting of a sequence at least about 90%, at least about 91%, at least about 92%, at least about 93%, at least about 94%, at least about 95%, at least about 96%, at least about 97%, at least about 98%, at least about 99%, or 100% identical to SEQ ID NO: 2 or 4. In a specific example, the modified RS1 locus comprising the genomically integrated nucleic acid construct comprises an RS1 coding sequence comprising, consisting essentially of, or consisting of a sequence at least about 90%, at least about 91%, at least about 92%, at least about 93%, at least about 94%, at least about 95%, at least about 96%, at least about 97%, at least about 98%, at least about 99%, or 100% identical to SEQ ID NO: 6, 11, or 12.

[0319] In some genomes, cells, or animals, integration of the nucleic acid construct into the endogenous RS1 locus prevents transcription of the endogenous RS1 gene downstream of the integration site. For example, the integration of the nucleic acid construct into the endogenous RS1 locus can reduce or eliminate expression of the endogenous retinoschisin protein and replace it with expression of the retinoschisin protein or fragment or variant thereof encoded by the nucleic acid construct. In one example, integration of the nucleic acid construct into the endogenous RS1 locus reduces expression of the endogenous retinoschisin protein. In another example, integration of the nucleic acid construct into the endogenous RS1 locus eliminates expression of the endogenous retinoschisin protein. In a specific example, the endogenous RS1 locus comprises a mutated RS1 gene comprising a mutation that causes X-linked juvenile retinoschisis, and expression of the genomically integrated nucleic acid construct reduces or eliminates expression of the mutated RS1 gene.

[0320] The target genomic locus at which the nucleic acid construct is stably integrated can be heterozygous for the retinoschisin coding sequence from the nucleic acid construct or homozygous for the retinoschisin coding sequence from the nucleic acid construct. A diploid organism has two alleles at each genetic locus. Each pair of alleles represents the genotype of a specific genetic locus. Genotypes are described as homozygous if there are two identical alleles at a particular locus and as heterozygous if the two alleles differ. An animal comprising a genomically integrated nucleic acid construct as described herein can comprise the nucleic acid construct in a target genomic locus in its germline.

[0321] The genomes, cells, or animals provided herein can be, for example, eukaryotic, including, for example, animal, mammalian, non-human mammalian, and human. The term “animal” includes mammals, fishes, and birds. A mammal can be, for example, a non-human mammal, a human, a rodent, a rat, a mouse, or a hamster. Other non-human mammals include, for example, non-human primates, monkeys, apes, cats, dogs, rabbits, horses, bulls, deer, bison, livestock (e.g., bovine species such as cows, steer, and so forth; ovine species such as sheep, goats, and so forth; and porcine species such as pigs and boars). Birds include, for example, chickens, turkeys, ostrich, geese, ducks, and so forth. Domesticated animals and agricultural animals are also included. The term “non-human” excludes humans.

[0322] The cells can be isolated cells (e.g., in vitro) or can be in vivo within an animal. Cells can also be any type of undifferentiated or differentiated state. For example, a cell can be a totipotent cell, a pluripotent cell (e.g., a human pluripotent cell or a non-human pluripotent cell such as a mouse embryonic stem (ES) cell or a rat ES cell), or a non-pluripotent cell. Totipotent cells include undifferentiated cells that can give rise to any cell type, and pluripotent cells include undifferentiated cells that possess the ability to develop into more than one differentiated cell types.

[0323] The cells provided herein can also be germ cells (e.g., sperm or oocytes). The cells can be mitotically competent cells or mitotically-inactive cells, meiotically competent cells or meiotically-inactive cells. Similarly, the cells can also be primary somatic cells or cells that are not a primary somatic cell. Somatic cells include any cell that is not a gamete, germ cell, gametocyte, or undifferentiated stem cell. For example, the cells can be liver cells, kidney cells, hematopoietic cells, endothelial cells, epithelial cells, fibroblasts, mesenchymal cells, keratinocytes, blood cells, melanocytes, monocytes, mononuclear cells, monocytic precursors, B cells, erythroid-megakaryocytic cells, eosinophils, macrophages, T cells, islet beta cells, exocrine cells, pancreatic progenitors, endocrine progenitors, adipocytes, preadipocytes, neurons, glial cells, neural stem cells, neurons, hepatoblasts, hepatocytes, cardiomyocytes, skeletal myoblasts, smooth muscle cells, ductal cells, acinar cells, alpha cells, beta cells, delta cells, PP cells, cholangiocytes, white or brown adipocytes, or ocular cells (e.g., trabecular meshwork cells, retinal pigment epithelial cells, retinal microvascular endothelial cells, retinal pericyte cells, conjunctival epithelial cells, conjunctival fibroblasts, iris pigment epithelial cells, keratocytes, lens epithelial cells, non-pigment ciliary epithelial cells, ocular choroid fibroblasts, photoreceptor cells, ganglion cells, bipolar cells, horizontal cells, or amacrine cells). For example, the cells can be eye cells, such as retinal cells (e.g., photoreceptors).

[0324] The cells provided herein can be normal, healthy cells, or can be diseased or mutant-bearing cells. For example, the cells can comprise one or more mutations associated with or that cause XLRS (e.g., encoding a R141C substitution in the retinoschisin protein).

[0325] The animals provided herein can be humans or they can be non-human animals. Non-human animals comprising a nucleic acid or expression cassette as described herein can be made by the methods described elsewhere herein. The term “animal” includes mammals, fishes, and birds. Mammals include, for example, humans, non-human primates, monkeys, apes, cats, dogs, horses, bulls, deer, bison, sheep, rabbits, rodents (e.g., mice, rats, hamsters, and guinea pigs), and livestock (e.g., bovine species such as cows and steer; ovine species such as sheep and goats; and porcine species such as pigs and boars). Birds include, for example, chickens, turkeys, ostrich, geese, and ducks. Domesticated animals and agricultural animals are also included. The term “non-human animal” excludes humans. Particular examples of non-human animals include rodents, such as mice and rats.

[0326] Non-human animals can be from any genetic background. For example, suitable mice can be from a 129 strain, a C57BL/6 strain, a mix of 129 and C57BL/6, a BALB/c strain, or a Swiss Webster strain. Examples of 129 strains include 129P1, 129P2, 129P3, 129X1, 129S1 (e.g., 12951/SV, 129S1/Svlm), 129S2, 129S4, 129S5, 12959/SvEvH, 129S6 (129/SvEvTac), 129S7, 129S8, 129T1, and 129T2. See, e.g., Festing et al. (1999) Mammalian Genome 10:836, herein incorporated by reference in its entirety for all purposes. Examples of C57BL strains include C57BL/A, C57BL/An, C57BL/GrFa, C57BL/Kal_wN, C57BL/6, C57BL/6J, C57BL/6ByJ, C57BL/6NJ, C57BL/10, C57BL/10ScSn, C57BL/10Cr, and C57BL/Ola. Suitable mice can also be from a mix of an aforementioned 129 strain and an aforementioned C57BL/6 strain (e.g., 50% 129 and 50% C57BL/6). Likewise, suitable mice can be from a mix of aforementioned 129 strains or a mix of aforementioned BL/6 strains (e.g., the 129S6 (129/SvEvTac) strain).

[0327] Similarly, rats can be from any rat strain, including, for example, an ACI rat strain, a Dark Agouti (DA) rat strain, a Wistar rat strain, a LEA rat strain, a Sprague Dawley (SD) rat strain, or a Fischer rat strain such as Fisher F344 or Fisher F6. Rats can also be obtained from a strain derived from a mix of two or more strains recited above. For example, a suitable rat can be from a DA strain or an ACI strain. The ACI rat strain is characterized as having black agouti, with white belly and feet and an RT1^{av1} haplotype. Such strains are available from a variety of sources including Harlan Laboratories. The Dark Agouti (DA) rat strain is characterized as having an agouti coat and an RT1^{av1} haplotype. Such rats are available from a variety of sources including Charles River and Harlan Laboratories. In some cases, suitable rats can be from an inbred rat strain. See, e.g., US 2014/0235933, herein incorporated by reference in its entirety for all purposes.

### VII. Methods for Modifying a Target Genomic Locus, Expressing Retinoschisin in a Cell, or Treating XLRS

[0328] Also provided herein are methods for modifying a target genomic locus or methods for expressing retinoschisin in a cell using the nucleic acid constructs comprising a retinoschisin coding sequence (i.e., encoding a retinoschisin protein or fragment or variant thereof) for integration into and expression from a target genomic locus as provided herein. Also provided herein are methods for modifying a target genomic locus or methods for expressing retinoschisin in a cell using the nuclease agents (or nucleic acids encoding) disclosed herein in combination with the nucleic acid constructs comprising a retinoschisin coding sequence (i.e., encoding a retinoschisin protein or fragment or variant thereof) for integration into and expression from a target genomic locus as provided herein. Also provided herein are methods for modifying a target genomic locus using the nuclease agents (or nucleic acids encoding) disclosed herein.

[0329] The methods can be, for example, methods of modifying a target genomic locus (e.g., an endogenous RS1 locus). Some such methods comprise administering a nuclease agent or a nucleic acid encoding the nuclease agent, wherein the nuclease agent targets a nuclease target sequence in the target genomic locus and cleaves the target genomic locus.

[0330] The methods can be, for example, methods of integrating a coding sequence for a retinoschisin protein or fragment thereof into a target genomic locus and expressing the retinoschisin protein or fragment thereof in a cell. Some such methods comprise administering a nucleic acid construct, vector, or lipid nanoparticle as described elsewhere herein to a cell. The coding sequence can then be integrated into the target genomic locus, and the retinoschisin protein or fragment thereof is expressed in the cell. The retinoschisin coding sequence can be operably linked to an endogenous promoter at the target genomic locus upon integration into the target genomic locus, or it can be operably linked to an exogenous promoter present in the nucleic acid construct. Some such methods comprise administering to a cell a nucleic acid construct, vector, or lipid nanoparticle as described elsewhere herein and a nuclease agent or a nucleic acid encoding the nuclease agent, wherein the nuclease agent targets a nuclease target sequence in the target genomic locus. The nuclease agent can cleave the target genomic locus, and the coding sequence from the nucleic acid construct can be integrated into the target genomic locus so that the retinoschisin protein or fragment thereof is expressed in the cell. Some such methods comprise administering to a cell a composition comprising a nucleic acid construct, vector, or lipid nanoparticle disclosed herein and a nuclease agent or a nucleic acid encoding the nuclease agent, wherein the nuclease agent targets a nuclease target sequence in the target genomic locus. The nuclease agent can cleave the target genomic locus, and the coding sequence from the nucleic acid construct can be integrated into the target genomic locus so that the retinoschisin protein or fragment thereof is expressed in the cell. The nuclease agent or nucleic acid encoding the nuclease agent can be administered, for example, in a vector (e.g., viral vector such as an AAV vector) or in a lipid nanoparticle.

[0331] The cells in the above methods can be isolated cells (e.g., in vitro) or can be in vivo within an animal. The cells can also be any type of undifferentiated or differentiated state. For example, a cell can be a totipotent cell, a pluripotent cell (e.g., a human pluripotent cell or a non-human pluripotent cell such as a mouse embryonic stem (ES) cell or a rat ES cell), or a non-pluripotent cell. Totipotent cells include undifferentiated cells that can give rise to any cell type, and pluripotent cells include undifferentiated cells that possess the ability to develop into more than one differentiated cell types.

[0332] The cells can also be germ cells (e.g., sperm or oocytes). The cells can be mitotically competent cells or mitotically-inactive cells, meiotically competent cells or meiotically-inactive cells. Similarly, the cells can also be primary somatic cells or cells that are not a primary somatic cell. Somatic cells include any cell that is not a gamete, germ cell, gametocyte, or undifferentiated stem cell. For example, the cells can be liver cells, kidney cells, hematopoietic cells, endothelial cells, epithelial cells, fibroblasts, mesenchymal cells, keratinocytes, blood cells, melanocytes, monocytes, mononuclear cells, monocytic precursors, B cells, erythroid-megakaryocytic cells, eosinophils, macrophages, T cells, islet beta cells, exocrine cells, pancreatic progenitors, endocrine progenitors, adipocytes, preadipocytes, neurons, glial cells, neural stem cells, neurons, hepatoblasts, hepatocytes, cardiomyocytes, skeletal myoblasts, smooth muscle cells, ductal cells, acinar cells, alpha cells, beta cells, delta cells, PP cells, cholangiocytes, white or brown adipocytes, or ocular cells (e.g., trabecular meshwork cells, retinal pigment epithelial cells, retinal microvascular endothelial cells, retinal pericyte cells, conjunctival epithelial cells, conjunctival fibroblasts, iris pigment epithelial cells, keratocytes, lens epithelial cells, non-pigment ciliary epithelial cells, ocular choroid fibroblasts, photoreceptor cells, ganglion cells, bipolar cells, horizontal cells, or amacrine cells). For example, the cells can be eye cells, such as retinal cells (e.g., photoreceptors).

[0333] The cells provided herein can be normal, healthy cells, or can be diseased or mutant-bearing cells. For example, the cells can comprise one or more mutations associated with or that cause XLRS (e.g., R141C).

[0334] The cells can be, for example, eukaryotic, including, for example, animal, mammalian, non-human mammalian, and human. In a specific example, the cells are human cells. The term “animal” includes mammals, fishes, and birds. A mammal can be, for example, a non-human mammal, a human, a rodent, a rat, a mouse, or a hamster. Other non-human mammals include, for example, non-human primates, monkeys, apes, cats, dogs, rabbits, horses, bulls, deer, bison, livestock (e.g., bovine species such as cows, steer, and so forth; ovine species such as sheep, goats, and so forth; and porcine species such as pigs and boars). Birds include, for example, chickens, turkeys, ostrich, geese, ducks, and so forth. Domesticated animals and agricultural animals are also included. The term “non-human” excludes humans.

[0335] The cells can be in vivo within an animal. The animal can be a human or can be a non-human animal. Non-human animals comprising a nucleic acid or expression cassette as described herein can be made by the methods described elsewhere herein. The term “animal” includes mammals, fishes, and birds. Mammals include, for example, humans, non-human primates, monkeys, apes, cats, dogs, horses, bulls, deer, bison, sheep, rabbits, rodents (e.g., mice, rats, hamsters, and guinea pigs), and livestock (e.g., bovine species such as cows and steer; ovine species such as sheep and goats; and porcine species such as pigs and boars). Birds include, for example, chickens, turkeys, ostrich, geese, and ducks. Domesticated animals and agricultural animals are also included. The term “non-human animal” excludes humans. Particular examples of non-human animals include rodents, such as mice and rats.

[0336] Non-human animals can be from any genetic background. For example, suitable mice can be from a 129 strain, a C57BL/6 strain, a mix of 129 and C57BL/6, a BALB/c strain, or a Swiss Webster strain. Examples of 129 strains include 129P1, 129P2, 129P3, 129X1, 129S1 (e.g., 12951/SV, 129S1/Svlm), 129S2, 129S4, 129S5, 12959/SvEvH, 129S6 (129/SvEvTac), 129S7, 129S8, 129T1, and 129T2. See, e.g., Festing et al. (1999) Mammalian Genome 10:836, herein incorporated by reference in its entirety for all purposes. Examples of C57BL strains include C57BL/A, C57BL/An, C57BL/GrFa, C57BL/Kal_wN, C57BL/6, C57BL/6J, C57BL/6ByJ, C57BL/6NJ, C57BL/10, C57BL/10ScSn, C57BL/10Cr, and C57BL/Ola. Suitable mice can also be from a mix of an aforementioned 129 strain and an aforementioned C57BL/6 strain (e.g., 50% 129 and 50% C57BL/6). Likewise, suitable mice can be from a mix of aforementioned 129 strains or a mix of aforementioned BL/6 strains (e.g., the 129S6 (129/SvEvTac) strain).

[0337] Similarly, rats can be from any rat strain, including, for example, an ACI rat strain, a Dark Agouti (DA) rat strain, a Wistar rat strain, a LEA rat strain, a Sprague Dawley (SD) rat strain, or a Fischer rat strain such as Fisher F344 or Fisher F6. Rats can also be obtained from a strain derived from a mix of two or more strains recited above. For example, a suitable rat can be from a DA strain or an ACI strain. The ACI rat strain is characterized as having black agouti, with white belly and feet and an RT1^{av1} haplotype. Such strains are available from a variety of sources including Harlan Laboratories. The Dark Agouti (DA) rat strain is characterized as having an agouti coat and an RT1^{av1} haplotype. Such rats are available from a variety of sources including Charles River and Harlan Laboratories. In some cases, suitable rats can be from an inbred rat strain. See, e.g., US 2014/0235933, herein incorporated by reference in its entirety for all purposes.

[0338] Also provided are methods of treating a subject with X-linked juvenile retinoschisis (XLRS). Such methods can comprise administering a nucleic acid construct, vector, or lipid nanoparticle as described elsewhere herein to a subject with XLRS, wherein the nucleic acid construct is integrated into and expressed from the target genomic locus in one or more retinal cells (e.g., photoreceptors) in the subject, and a therapeutically effective level of retinoschisin expression is achieved in the subject. The subject can have, for example, an endogenous RS1 gene comprising at least one mutation associated with or that causes X-linked juvenile retinoschisis (e.g., R141C). The retinoschisin coding sequence can be operably linked to an endogenous promoter at the target genomic locus upon integration into the target genomic locus, or it can be operably linked to an exogenous promoter present in the nucleic acid construct. Such methods can also comprise administering to the subject a nucleic acid construct, vector, or lipid nanoparticle as described elsewhere herein and a nuclease agent or a nucleic acid encoding the nuclease agent, wherein the nuclease agent targets a nuclease target sequence in the target genomic locus, the nucleic acid construct is integrated into and expressed from the target genomic locus in one or more retinal cells (e.g., photoreceptors) in the subject, and a therapeutically effective level of retinoschisin expression is achieved in the subject. Such methods can also comprise administering to the subject a composition comprising a nucleic acid construct, vector, or lipid nanoparticle disclosed herein and a nuclease agent or a nucleic acid encoding the nuclease agent, wherein the nuclease agent targets a nuclease target sequence in the target genomic locus, the nucleic acid construct is integrated into and expressed from the target genomic locus in one or more retinal cells (e.g., photoreceptors) in the subject, and a therapeutically effective level of retinoschisin expression is achieved in the subject.

[0339] XLRS is a vitreo-retinal dystrophy characterized by macular pathology and by splitting of the superficial layer of the retina. Macular changes are present in almost all cases. In the fundi, radially oriented intraretinal foveomacular cysts are seen in a spoke-wheel configuration, with the absence of foveal reflex in most cases. In addition, approximately half of cases have bilateral peripheral retinoschisis in the inferotemporal part of the retina. Aside from the typical fundus appearance, strabismus, nystagmus, axial hyperopia, defective color vision and foveal ectopy can be present. The most important complications are vitreous hemorrhage, retinal detachment, and neovascular glaucoma. Foveal schisis with “spoke-wheel” pattern is the characteristic finding on fundus exam, present in nearly 100% of cases. Schisis may occur peripherally in up to 50% of patients. Peripheral schisis can lead to holes and tears of the inner leaf with potential for hemorrhage from unsupported crossing vessels. Additional peripheral changes include pigmentation resembling RP, retinal fibrosis and white flecks.

[0340] Because XLRS is a recessive disease caused by the loss in retinoschisin function, gene replacement therapy has been considered as a potential treatment for this disease. Furthermore, because retinoschisin functions as an extracellular protein, beneficial treatment is not necessarily restricted to the transfected cell expressing the replacement gene but can encompass a wider area due to the spread of the secreted protein from the site of expression.

[0341] In some methods, integration of the nucleic acid construct results in retinal structural restoration (e.g., at least partial retinal structural restoration). In some methods, integration of the nucleic acid construct results in retinal functional restoration (e.g., at least partial retinal functional restoration).

[0342] The subject with XLRS in the above methods can be any type of animal as disclosed above. In a particular example, the subject is a human.

[0343] In methods targeting a cell in vivo in an animal, the nucleic acid construct can be inserted in particular types of cells in the animal. The method and vehicle for introducing the nuclease agent (or nucleic acid encoding the nuclease agent) and the nucleic acid construct into the animal can affect which types of cells in the animal are targeted. In some methods, for example, the nucleic acid construct is inserted into a target genomic locus (e.g., an endogenous RS1 locus) in retinal cells, such as photoreceptors. Methods and vehicles for introducing the nuclease agent (or nucleic acid encoding the nuclease agent) and the nucleic acid construct into the animal (including methods and vehicles that target the eye or retinal cells (e.g., photoreceptors), such as lipid nanoparticle-mediated delivery and AAV2-mediated delivery, AAV5-mediated delivery, AAV8-mediated delivery, or AAV7m8-mediated delivery and intravitreal or subretinal injection), are disclosed in more detail elsewhere herein.

[0344] Any target genomic locus capable of expressing a gene can be used, such as a safe harbor locus (safe harbor gene) or an endogenous RS1 locus. Such loci are described in more detail elsewhere herein. In a specific example, the target genomic locus can be an endogenous RS1 locus, such as an endogenous RS1 locus comprising one or more mutations associated with or that cause XLRS (e.g., R141C). For example, the nucleic acid construct can be genomically integrated in intron 1 of the endogenous RS1 locus. Endogenous RS1 exon 1 can then splice into the coding sequence for the retinoschisin protein or fragment or variant thereof in the nucleic acid construct. In a specific example, the modified RS1 locus comprising the genomically integrated nucleic acid construct encodes a protein comprising, consisting essentially of, or consisting of a sequence at least about 90%, at least about 91%, at least about 92%, at least about 93%, at least about 94%, at least about 95%, at least about 96%, at least about 97%, at least about 98%, at least about 99%, or 100% identical to SEQ ID NO: 2 or 4. In a specific example, the modified RS1 locus comprising the genomically integrated nucleic acid construct comprises an RS1 coding sequence comprising, consisting essentially of, or consisting of a sequence at least about 90%, at least about 91%, at least about 92%, at least about 93%, at least about 94%, at least about 95%, at least about 96%, at least about 97%, at least about 98%, at least about 99%, or 100% identical to SEQ ID NO: 6, 11, or 12.

[0345] Integration of the nucleic acid construct into the endogenous RS1 locus can, in some cases, prevent transcription of the endogenous RS1 gene downstream of the integration site. The integration of the nucleic acid construct into the endogenous RS1 locus can reduce or eliminate expression of the endogenous retinoschisin protein and replace it with expression of the retinoschisin protein or fragment or variant thereof encoded by the nucleic acid construct. In one example, integration of the nucleic acid construct into the endogenous RS1 locus reduces expression of the endogenous retinoschisin protein. In another example, integration of the nucleic acid construct into the endogenous RS1 locus eliminates expression of the endogenous retinoschisin protein. In methods targeting cells in vivo, such as methods of treating a subject with XLRS, the integration of the nucleic acid construct into the endogenous RS1 locus in one or more cells can reduce or eliminate expression of the endogenous retinoschisin protein in those cells and replace it with expression of the retinoschisin protein or fragment or variant thereof encoded by the nucleic acid construct. In this way, integration of the nucleic acid construct can simultaneously knock out the endogenous RS1 gene (e.g., an endogenous RS1 gene comprising one or more mutations associated with or that cause XLRS, such as R141C) and knock in a replacement retinoschisin coding sequence (e.g., a replacement retinoschisin coding sequence that does not comprise mutations associated with or that cause XLRS). In other methods, however, an endogenous RS1 gene comprising one or more mutations associated with or that cause XLRS can first be inactivated (e.g., using one or more nuclease agents that target and disrupt the endogenous RS1 gene), and a nucleic acid construct comprising a replacement retinoschisin coding sequence (e.g., a replacement retinoschisin coding sequence that does not comprise mutations associated with or that cause XLRS) can subsequently be integrated into a target genomic locus. In other methods, the nucleic acid construct can be integrated first, and the endogenous RS1 gene can subsequently be inactivated.

[0346] Targeted insertion of the nucleic acid construct comprising the retinoschisin coding sequence into a target genomic locus, and particularly an endogenous RS1 locus, offers multiple advantages. Such methods result in stable modification to allow for stable, long-term expression of the retinoschisin coding sequence. With respect to the RS1 locus, such methods are able to utilize the endogenous RS1 promoter and regulatory regions to achieve physiologically relevant expression (level of expression, timing of expression, and location of expression). For example, the retinoschisin coding sequence in the nucleic acid construct can comprise a promoterless gene, and the inserted nucleic acid construct can be operably linked to an endogenous promoter in the target genomic locus (e.g., RS1 locus). Use of an endogenous promoter is advantageous because it obviates the need for inclusion of a promoter in the nucleic acid construct, allowing packaging of larger transgenes that may not normally package efficiently (e.g., in AAV). Alternatively, the retinoschisin coding sequence in the nucleic acid construct can be operably linked to an exogenous promoter in the nucleic acid construct. Examples of types of promoters that can be used are disclosed elsewhere herein.

[0347] Optionally, some or all of the endogenous gene (e.g., endogenous RS1 gene) at the target genomic locus can be expressed upon insertion of the retinoschisin coding sequence from the nucleic acid construct. Alternatively, in some methods, none of the endogenous gene at the target genomic locus is expressed. As one example, the modified target genomic locus (e.g., modified RS1 locus) after integration of the nucleic acid construct can encode a chimeric protein comprising an endogenous secretion signal or a fragment thereof and the retinoschisin protein encoded by the nucleic acid construct. In another example, the first intron of an RS1 locus can be targeted. The secretion signal peptide of RS1 is encoded by exon 1 and part of exon 2 of the RS1 gene. In such a scenario, a promoterless cassette bearing a splice acceptor and the retinoschisin coding sequence will support expression and secretion of the retinoschisin protein. Splicing between endogenous RS1 exon 1 and the integrated retinoschisin coding sequence creates a chimeric mRNA and protein including the endogenous retinoschisin sequence encoded by exon 1 operably linked to the retinoschisin protein sequence encoded by the integrated nucleic acid construct.

[0348] The retinoschisin coding sequence in the nucleic acid construct can be inserted into the target genomic locus by any means, including homologous recombination (HR) and non-homologous end joining (NHEJ) as described elsewhere herein.

[0349] In a specific example, the nucleic acid construct can be inserted via homology-independent targeted integration (e.g., directional homology-independent targeted integration). For example, the retinoschisin coding sequence in the nucleic acid construct can be flanked on each side by a target site for a nuclease agent (e.g., the same target site as in the target genomic locus, and the same nuclease agent being used to cleave the target site in the target genomic locus). The nuclease agent can then cleave the target sites flanking the retinoschisin coding sequence. In a specific example, the nucleic acid construct is delivered AAV-mediated delivery, and cleavage of the target sites flanking the retinoschisin coding sequence can remove the inverted terminal repeats (ITRs) of the AAV. Removal of the ITRs can make it easier to assess successful targeting, because presence of the ITRs can hamper sequencing efforts due to the repeated sequences. In some methods, the target site in the target genomic locus (e.g., a gRNA target sequence including the flanking protospacer adjacent motif) is no longer present if the retinoschisin coding sequence is inserted into the target genomic locus in the correct orientation but it is reformed if the retinoschisin protein coding sequence is inserted into the target genomic locus in the opposite orientation. This can help ensure that the retinoschisin coding sequence is inserted in the correct orientation for expression.

[0350] In methods in which a nucleic acid construct (or vector or LNP) and a nuclease agent or nucleic acid encoding a nuclease agent are administered together with a nucleic acid construct, the nucleic acid construct and the nuclease agent or the nucleic acid encoding the nuclease agent can be administered simultaneously. Alternatively, the nucleic acid construct and the nuclease agent or the nucleic acid encoding the nuclease agent can be administered sequentially in any order. For example, the nucleic acid construct can be administered after the nuclease agent or the nucleic acid encoding the nuclease agent, or the nuclease agent or the nucleic acid encoding the nuclease agent can be administered after the nucleic acid construct. For example, the nuclease agent or the nucleic acid encoding the nuclease agent can be administered about 1 hour to about 48 hours, about 1 hour to about 24 hours, about 1 hour to about 12 hours, about 1 hour to about 6 hours, about 1 hour to about 2 hours, about 2 hours to about 48 hours, about 2 hours to about 24 hours, about 2 hours to about 12 hours, about 2 hours to about 6 hours, about 3 hours to about 48 hours, about 6 hours to about 48 hours, about 12 hours to about 48 hours, or about 24 hours to about 48 hours prior to or subsequent to administration of the nucleic acid construct.

[0351] The nucleic acid construct and the nuclease agent or nucleic acid encoding a nuclease agent can be administered in any suitable delivery vehicle. In some methods, the nucleic acid construct and the nuclease agent or nucleic acid encoding a nuclease agent can be administered in the same delivery vehicle (e.g., the same lipid nanoparticle or vector). In some methods in which the nuclease agent comprises a Cas protein or a nucleic acid encoding a Cas protein and a guide RNA or a DNA encoding a guide RNA, both components can be administered in the same delivery vehicle, or alternatively they can be delivered in separate delivery vehicles. In other methods, the nucleic acid construct and the nuclease agent or nucleic acid encoding a nuclease agent can be administered in different delivery vehicles (e.g., administration of the nuclease agent or the nucleic acid encoding the nuclease agent in a first vector or in an LNP, and administration of the nucleic acid construct in a second vector, such as an AAV vector).

[0352] The nuclease agent (or nucleic acid encoding the nuclease agent) and the nucleic acid construct can be introduced in any form (e.g., DNA or RNA for guide RNAs; DNA, RNA, or protein for Cas proteins) via any delivery method (e.g., AAV, LNP, or HDD) and any route of administration (e.g., intravitreal injection or subretinal injection) as disclosed elsewhere herein. As one example, the nucleic acid construct is delivered via adeno-associated virus (AAV)-mediated delivery (e.g., AAV2-mediated delivery, AAV5-mediated delivery, AAV8-mediated delivery, or AAV7m8-mediated delivery). Likewise, the nuclease agent (or nucleic acid encoding the nuclease agent) can be delivered by lipid nanoparticle (LNP)-mediated delivery or AAV-mediated delivery. For example, the nuclease agent can be CRISPR/Cas9, and a Cas9 mRNA and a gRNA targeting an endogenous RS1 locus (e.g., intron 1 of RS1) can be delivered via LNP-mediated delivery or AAV-mediated delivery, and the nucleic acid construct (e.g., a bidirectional construct or a homology-independent targeted integration construct) can be delivered via AAV2-mediated delivery, AAV5-mediated delivery, AAV8-mediated delivery, or AAV7m8-mediated delivery. In another specific example, both the nucleic acid encoding the nuclease agent and the nucleic acid construct are delivered via AAV-mediated delivery (e.g., in a single AAV or via two separate AAVs). For example, a first AAV can carry a Cas9 expression cassette, and a second AAV can carry a gRNA expression cassette and the nucleic acid construct. Similarly, a first AAV can carry a Cas9 expression cassette, and a second AAV can carry two or more gRNA expression cassettes and the nucleic acid construct. Alternatively, a first AAV can carry a Cas9 expression cassette (e.g., Cas9 coding sequence operably linked to a promoter) and a gRNA expression cassette (e.g., gRNA coding sequence operably linked to a promoter), and the second AAV can carry the nucleic acid construct. Similarly, a first AAV can carry a Cas9 expression cassette (e.g., Cas9 coding sequence operably linked to a promoter) and two gRNA expression cassettes (e.g., gRNA coding sequences operably linked to promoters), and the second AAV can carry the nucleic acid construct. Different promoters can be used to drive expression of the gRNA, such as a U6 promoter or the small tRNA Gln. Likewise, different promoters can be used to drive Cas9 expression. In some methods, small promoters are used so that the Cas9 coding sequence can fit into an AAV construct. In some methods, small Cas9 proteins (e.g., SaCas9 or CjCas9 are used to maximize the AAV packaging capacity).

[0353] The methods disclosed herein comprise administering or introducing into a cell or animal nuclease agents (or nucleic acids encoding nuclease agents) and nucleic acid constructs (i.e., exogenous donor nucleic acids) comprising a retinoschisin coding sequence (i.e., encoding a retinoschisin protein or fragment or variant thereof) for integration into and expression from a target genomic locus. “Introducing” includes presenting to the cell or animal the nucleic acid or protein in such a manner that the nucleic acid or protein gains access to the interior of the cell or to the interior of cells within the animal. The introducing can be accomplished by any means, and two or more of the components (e.g., two of the components, or all of the components) can be introduced into the cell or animal simultaneously or sequentially in any combination. For example, a nuclease agent can be introduced into a cell or animal before introduction of the nucleic acid construct. In addition, two or more of the components can be introduced into the cell or animal by the same delivery method or different delivery methods. Similarly, two or more of the components can be introduced into an animal by the same route of administration or different routes of administration.

[0354] A guide RNA can be introduced into the cell in the form of an RNA (e.g., in vitro transcribed RNA) or in the form of a DNA encoding the guide RNA. Likewise, protein components such as Cas9 proteins, ZFNs, or TALENs can be introduced into the cell in the form of DNA, RNA, or protein. For example, a guide RNA and a Cas9 protein can both be introduced in the form of RNA. When introduced in the form of a DNA, the DNA encoding a guide RNA can be operably linked to a promoter active in the cell. For example, a guide RNA may be delivered via AAV and expressed in vivo under a U6 promoter. Such DNAs can be in one or more expression constructs. For example, such expression constructs can be components of a single nucleic acid molecule. Alternatively, they can be separated in any combination among two or more nucleic acid molecules (i.e., DNAs encoding one or more CRISPR RNAs and DNAs encoding one or more tracrRNAs can be components of a separate nucleic acid molecules).

[0355] Nucleic acids encoding guide RNAs or nuclease agents can be operably linked to a promoter in an expression construct. Expression constructs include any nucleic acid constructs capable of directing expression of a gene or other nucleic acid sequence of interest and which can transfer such a nucleic acid sequence of interest to a target cell. Suitable promoters that can be used in an expression construct include promoters active, for example, in one or more of a eukaryotic cell, a human cell, a non-human cell, a mammalian cell, a non-human mammalian cell, a rodent cell, a mouse cell, a rat cell, a hamster cell, a rabbit cell, a pluripotent cell, an embryonic stem (ES) cell, an adult stem cell, a developmentally restricted progenitor cell, an induced pluripotent stem (iPS) cell, or a one-cell stage embryo. Such promoters can be, for example, conditional promoters, inducible promoters, constitutive promoters, or tissue-specific promoters. Optionally, the promoter can be a bidirectional promoter driving expression of both a guide RNA in one direction and another component in the other direction. Such bidirectional promoters can consist of (1) a complete, conventional, unidirectional Pol III promoter that contains 3 external control elements: a distal sequence element (DSE), a proximal sequence element (PSE), and a TATA box; and (2) a second basic Pol III promoter that includes a PSE and a TATA box fused to the 5′ terminus of the DSE in reverse orientation. For example, in the H1 promoter, the DSE is adjacent to the PSE and the TATA box, and the promoter can be rendered bidirectional by creating a hybrid promoter in which transcription in the reverse direction is controlled by appending a PSE and TATA box derived from the U6 promoter. See, e.g., US 2016/0074535, herein incorporated by references in its entirety for all purposes. Use of a bidirectional promoter to express genes encoding a guide RNA and another component simultaneously allows for the generation of compact expression cassettes to facilitate delivery.

[0356] Guide RNAs or nucleic acids encoding guide RNAs (or other components) can be provided in compositions comprising a carrier increasing the stability of the guide RNA (e.g., prolonging the period under given conditions of storage (e.g., −20° C., 4° C., or ambient temperature) for which degradation products remain below a threshold, such below 0.5% by weight of the starting nucleic acid or protein; or increasing the stability in vivo). Non-limiting examples of such carriers include poly(lactic acid) (PLA) microspheres, poly(D,L-lactic-coglycolic-acid) (PLGA) microspheres, liposomes, micelles, inverse micelles, lipid cochleates, and lipid microtubules.

[0357] The methods provided herein do not depend on a particular method for introducing a nucleic acid or protein into the cell, only that the nucleic acid or protein gains access to the interior of a least one cell. Methods for introducing nucleic acids and proteins into various cell types are known in the art and include, for example, stable transfection methods, transient transfection methods, and virus-mediated methods.

[0358] Transfection protocols as well as protocols for introducing nucleic acids or proteins into cells may vary. Non-limiting transfection methods include chemical-based transfection methods using liposomes; nanoparticles; calcium phosphate (Graham et al. (1973) Virology 52 (2): 456-67, Bacchetti et al. (1977) Proc. Natl. Acad. Sci. USA 74 (4): 1590-4, and Kriegler, M (1991). Transfer and Expression: A Laboratory Manual. New York: W. H. Freeman and Company. pp. 96-97); dendrimers; or cationic polymers such as DEAE-dextran or polyethylenimine. Non-chemical methods include electroporation, sonoporation, and optical transfection. Particle-based transfection includes the use of a gene gun, or magnet-assisted transfection (Bertram (2006) Current Pharmaceutical Biotechnology 7, 277-28). Viral methods can also be used for transfection.

[0359] Introduction of nucleic acids or proteins into a cell can also be mediated by electroporation, by intracytoplasmic injection, by viral infection, by adenovirus, by lentivirus, by retrovirus, by transfection, by lipid-mediated transfection, or by nucleofection. Introduction of nucleic acids or proteins into a cell can also be mediated by adeno-associated virus. Nucleofection is an improved electroporation technology that enables nucleic acid substrates to be delivered not only to the cytoplasm but also through the nuclear membrane and into the nucleus. In addition, use of nucleofection in the methods disclosed herein typically requires much fewer cells than regular electroporation (e.g., only about 2 million compared with 7 million by regular electroporation). In one example, nucleofection is performed using the LONZA® NUCLEOFECTOR™ system.

[0360] Introduction of nucleic acids or proteins into a cell (e.g., a one-cell stage embryo) can also be accomplished by microinjection. In one-cell stage embryos, microinjection can be into the maternal and/or paternal pronucleus or into the cytoplasm. If the microinjection is into only one pronucleus, the paternal pronucleus is preferable due to its larger size. Microinjection of an mRNA is preferably into the cytoplasm (e.g., to deliver mRNA directly to the translation machinery), while microinjection of a Cas protein or a nucleic acid encoding a Cas protein or encoding an RNA is preferable into the nucleus/pronucleus. Alternatively, microinjection can be carried out by injection into both the nucleus/pronucleus and the cytoplasm: a needle can first be introduced into the nucleus/pronucleus and a first amount can be injected, and while removing the needle from the one-cell stage embryo a second amount can be injected into the cytoplasm. If a Cas protein is injected into the cytoplasm, the Cas protein preferably comprises a nuclear localization signal to ensure delivery to the nucleus/pronucleus. Methods for carrying out microinjection are well known. See, e.g., Nagy et al. (Nagy A, Gertsenstein M, Vintersten K, Behringer R., 2003, Manipulating the Mouse Embryo. Cold Spring Harbor, New York: Cold Spring Harbor Laboratory Press); Meyer et al. (2010) Proc. Natl. Acad. Sci. USA 107:15022-15026 and Meyer et al. (2012) Proc. Natl. Acad. Sci. USA 109:9354-9359. Introduction into one-cell stage embryos can also be accomplished by electroporation.

[0361] Various methods and compositions are provided herein to allow for introduction of a nucleic acid or protein into a cell or animal. Such methods for introducing nucleic acid or proteins into a cell or animal can include, for example, vector delivery, particle-mediated delivery, exosome-mediated delivery, lipid-nanoparticle (LNP)-mediated delivery, cell-penetrating-peptide-mediated delivery, or implantable-device-mediated delivery. As specific examples, a nucleic acid or protein can be introduced into a cell or animal in a carrier such as a poly(lactic acid) (PLA) microsphere, a poly(D,L-lactic-coglycolic-acid) (PLGA) microsphere, a liposome, a micelle, an inverse micelle, a lipid cochleate, or a lipid microtubule. Some specific examples of delivery to an animal include hydrodynamic delivery, virus-mediated delivery (e.g., adeno-associated virus (AAV)-mediated delivery, or by adenovirus, by lentivirus, or by retrovirus), and lipid-nanoparticle-mediated delivery. In one specific example, both the nuclease agent and nucleic acid construct can be delivered via LNP-mediated delivery. In another specific example, both the nuclease agent and nucleic acid construct can be delivered via AAV-mediated delivery. For example, the nuclease agent and the nucleic acid construct can be delivered via multiple different AAV vectors (e.g., two different AAV vectors). In a specific example in which the nuclease agent is CRISPR/Cas (e.g., CRISPR/Cas9), a first AAV vector can deliver the Cas (e.g., Cas9), and a second AAV vector can deliver the gRNA and the nucleic acid construct. For example, small promoters can be used so that the Cas9 coding sequence can fit into an AAV construct.

[0362] In another specific example, the nuclease agent can be delivered via LNP-mediated delivery and the nucleic acid construct can be delivered via AAV-mediated delivery. In another specific example, the nuclease agent can be delivered via AAV-mediated delivery and the nucleic acid construct can be delivered via LNP-mediated delivery.

[0363] Introduction of nucleic acids can also be accomplished by virus-mediated delivery, such as AAV-mediated delivery or lentivirus-mediated delivery (e.g., an AAV vector or a lentiviral vector). Other exemplary viruses/viral vectors include retroviruses, adenoviruses, vaccinia viruses, poxviruses, and herpes simplex viruses. The viruses can infect dividing cells, non-dividing cells, or both dividing and non-dividing cells. The viruses can integrate into the host genome or alternatively do not integrate into the host genome. Such viruses can also be engineered to have reduced immunity. The viruses can be replication-competent or can be replication-defective (e.g., defective in one or more genes necessary for additional rounds of virion replication and/or packaging). Viruses can cause transient expression, long-lasting expression (e.g., at least 1 week, 2 weeks, 1 month, 2 months, or 3 months), or permanent expression (e.g., of Cas9 and/or gRNA). Exemplary viral titers (e.g., AAV titers) include 10¹², 10¹³, 10¹⁴, 10¹⁵, and 10¹⁶ vector genomes/mL. Exemplary viral titers (e.g., AAV titers) include about 10¹², about 10¹³, about 10¹⁴, about 10¹⁵, and about 10¹⁶ vector genomes (vg)/mL, or between about 10¹² to about 10¹⁶, between about 10¹² to about 10¹⁵, between about 10¹² to about 10¹⁴, between about 10¹² to about 10¹³, between about 10¹³ to about 10¹⁶, between about 10¹⁴ to about 10¹⁶, between about 10¹⁵ to about 10¹⁶, or between about 10¹³ to about 10¹⁵ vg/mL. Other exemplary viral titers (e.g., AAV titers) include about 10¹², about 10¹³, about 10¹⁴, about 10¹⁵, and about 10¹⁶ vector genomes (vg)/kg of body weight, or between about 10¹² to about 10¹⁶, between about 10¹² to about 10¹⁵, between about 10¹² to about 10¹⁴, between about 10¹² to about 10¹³, between about 10¹³ to about 10¹⁶, between about 10¹⁴ to about 10¹⁶, between about 10¹⁵ to about 10¹⁶, or between about 10¹³ to about 10¹⁵ vg/kg of body weight.

[0364] The ssDNA AAV genome consists of two open reading frames, Rep and Cap, flanked by two inverted terminal repeats that allow for synthesis of the complementary DNA strand. When constructing an AAV transfer plasmid, the transgene is placed between the two ITRs, and Rep and Cap can be supplied in trans. In addition to Rep and Cap, AAV can require a helper plasmid containing genes from adenovirus. These genes (E4, E2a, and VA) mediate AAV replication. For example, the transfer plasmid, Rep/Cap, and the helper plasmid can be transfected into HEK293 cells containing the adenovirus gene E1+ to produce infectious AAV particles. Alternatively, the Rep, Cap, and adenovirus helper genes may be combined into a single plasmid. Similar packaging cells and methods can be used for other viruses, such as retroviruses.

[0365] Multiple serotypes of AAV have been identified. These serotypes differ in the types of cells they infect (i.e., their tropism), allowing preferential transduction of specific cell types. Serotypes for photoreceptor cells include AAV2, AAV5, and AAV8. Serotypes for retinal pigment epithelium tissue include AAV1, AAV2, AAV4, AAV5, and AAV8. In a specific example, the AAV vector comprising the nucleic acid construct can be AAV2, AAV5, or AAV8.

[0366] Tropism can be further refined through pseudotyping, which is the mixing of a capsid and a genome from different viral serotypes. For example AAV2/5 indicates a virus containing the genome of serotype 2 packaged in the capsid from serotype 5. Use of pseudotyped viruses can improve transduction efficiency, as well as alter tropism. Hybrid capsids derived from different serotypes can also be used to alter viral tropism. For example, AAV-DJ contains a hybrid capsid from eight serotypes and displays high infectivity across a broad range of cell types in vivo. AAV-DJ8 is another example that displays the properties of AAV-DJ but with enhanced brain uptake. AAV serotypes can also be modified through mutations. Examples of mutational modifications of AAV2 include Y444F, Y500F, Y730F, and S662V. Examples of mutational modifications of AAV3 include Y705F, Y731F, and T492V. Examples of mutational modifications of AAV6 include S663V and T492V. Other pseudotyped/modified AAV variants include AAV2/1, AAV2/6, AAV2/7, AAV2/8, AAV2/9, AAV2.5, AAV8.2, and AAV/SASTG. In a specific example, the AAV is AAV7m8, an AAV variant that mediates highly efficient delivery to all retinal layers and to photoreceptors. See, e.g., Dalkara et al. (2013) Sci. Transl. Med. 5:189ra76, herein incorporated by reference in its entirety for all purposes.

[0367] To accelerate transgene expression, self-complementary AAV (scAAV) variants can be used. Because AAV depends on the cell's DNA replication machinery to synthesize the complementary strand of the AAV's single-stranded DNA genome, transgene expression may be delayed. To address this delay, scAAV containing complementary sequences that are capable of spontaneously annealing upon infection can be used, eliminating the requirement for host cell DNA synthesis. However, single-stranded AAV (ssAAV) vectors can also be used.

[0368] To increase packaging capacity, longer transgenes may be split between two AAV transfer plasmids, the first with a 3′ splice donor and the second with a 5′ splice acceptor. Upon co-infection of a cell, these viruses form concatemers, are spliced together, and the full-length transgene can be expressed. Although this allows for longer transgene expression, expression is less efficient. Similar methods for increasing capacity utilize homologous recombination. For example, a transgene can be divided between two transfer plasmids but with substantial sequence overlap such that co-expression induces homologous recombination and expression of the full-length transgene.

[0369] In certain AAVs, the cargo can include a nuclease agent (i.e., nucleic acid encoding a nuclease agent). In certain AAVs, the cargo can include a guide RNA or a nucleic acid encoding a guide RNA. In certain AAVs, the cargo can include an mRNA encoding a Cas nuclease, such as Cas9, and a guide RNA or a nucleic acid encoding a guide RNA. In certain AAVs, the cargo can include a nucleic acid construct as described elsewhere herein. In certain AAVs, the cargo can include a nuclease agent and a nucleic acid construct as described elsewhere herein. In certain AAVs, the cargo can include an mRNA encoding a Cas nuclease, such as Cas9, a guide RNA or a nucleic acid encoding a guide RNA, and a nucleic acid construct as described elsewhere herein.

[0370] Introduction of nucleic acids and proteins can also be accomplished by lipid nanoparticle (LNP)-mediated delivery. For example, LNP-mediated delivery can be used to deliver a guide RNA in the form of RNA. Delivery through such methods results in transient presence of the guide RNA, and the biodegradable lipids improve clearance, improve tolerability, and decrease immunogenicity. Lipid formulations can protect biological molecules from degradation while improving their cellular uptake. Lipid nanoparticles are particles comprising a plurality of lipid molecules physically associated with each other by intermolecular forces. These include microspheres (including unilamellar and multilamellar vesicles, e.g., liposomes), a dispersed phase in an emulsion, micelles, or an internal phase in a suspension. Such lipid nanoparticles can be used to encapsulate one or more nucleic acids or proteins for delivery. Formulations which contain cationic lipids are useful for delivering polyanions such as nucleic acids. Other lipids that can be included are neutral lipids (i.e., uncharged or zwitterionic lipids), anionic lipids, helper lipids that enhance transfection, and stealth lipids that increase the length of time for which nanoparticles can exist in vivo. Examples of suitable cationic lipids, neutral lipids, anionic lipids, helper lipids, and stealth lipids can be found in WO 2016/010840 A1 and WO 2017/173054 A1, each of which is herein incorporated by reference in its entirety for all purposes. An exemplary lipid nanoparticle can comprise a cationic lipid and one or more other components. In one example, the other component can comprise a helper lipid such as cholesterol. In another example, the other components can comprise a helper lipid such as cholesterol and a neutral lipid such as DSPC. In another example, the other components can comprise a helper lipid such as cholesterol, an optional neutral lipid such as DSPC, and a stealth lipid such as S010, S024, S027, S031, or S033.

[0371] The LNP may contain one or more or all of the following: (i) a lipid for encapsulation and for endosomal escape; (ii) a neutral lipid for stabilization; (iii) a helper lipid for stabilization; and (iv) a stealth lipid. See, e.g., Finn et al. (2018) Cell Rep. 22(9):2227-2235 and WO 2017/173054 A1, each of which is herein incorporated by reference in its entirety for all purposes. In certain LNPs, the cargo can include a nuclease agent. In certain LNPs, the cargo can include a guide RNA or a nucleic acid encoding a guide RNA. In certain LNPs, the cargo can include an mRNA encoding a Cas nuclease, such as Cas9, and a guide RNA or a nucleic acid encoding a guide RNA. In certain LNPs, the cargo can include an exogenous donor sequence. In certain LNPs, the cargo can include a nuclease agent and an exogenous donor sequence. In certain LNPs, the cargo can include an mRNA encoding a Cas nuclease, such as Cas9, a guide RNA or a nucleic acid encoding a guide RNA, and an exogenous donor sequence.

[0372] The lipid for encapsulation and endosomal escape can be a cationic lipid. The lipid can also be a biodegradable lipid, such as a biodegradable ionizable lipid. One example of a suitable lipid is Lipid A or LP01, which is (9Z,12Z)-3-((4,4-bis(octyloxy)butanoyl)oxy)-2-((((3-(diethylamino)propoxy)carbonyl)oxy)methyl)propyl octadeca-9,12-dienoate, also called 3-((4,4-bis(octyloxy)butanoyl)oxy)-2-((((3-(diethylamino)propoxy)carbonyl)oxy)methyl)propyl(9Z,12Z)-octadeca-9,12-dienoate. See, e.g., Finn et al. (2018) Cell Rep. 22(9):2227-2235 and WO 2017/173054 A1, each of which is herein incorporated by reference in its entirety for all purposes. Another example of a suitable lipid is Lipid B, which is ((5-((dimethylamino)methyl)-1,3-phenylene)bis(oxy))bis(octane-8,1-diyl)bis(decanoate), also called ((5-((dimethylamino)methyl)-1,3-phenylene)bis(oxy))bis(octane-8,1-diyl)bis(decanoate). Another example of a suitable lipid is Lipid C, which is 2-((4-(((3-(dimethylamino)propoxy)carbonyl)oxy)hexadecanoyl)oxy)propane-1,3-diyl(9Z,9′Z,12Z,12′Z)-bis(octadeca-9,12-dienoate). Another example of a suitable lipid is Lipid D, which is 3-(((3-(dimethylamino)propoxy)carbonyl)oxy)-13-(octanoyloxy)tridecyl 3-octylundecanoate. Other suitable lipids include heptatriaconta-6,9,28,31-tetraen-19-yl 4-(dimethylamino)butanoate (also known as Dlin-MC3-DMA (MC3))).

[0373] Some such lipids suitable for use in the LNPs described herein are biodegradable in vivo. For example, LNPs comprising such a lipid include those where at least 75% of the lipid is cleared from the plasma within 8, 10, 12, 24, or 48 hours, or 3, 4, 5, 6, 7, or 10 days. As another example, at least 50% of the LNP is cleared from the plasma within 8, 10, 12, 24, or 48 hours, or 3, 4, 5, 6, 7, or 10 days.

[0374] Such lipids may be ionizable depending upon the pH of the medium they are in. For example, in a slightly acidic medium, the lipids may be protonated and thus bear a positive charge. Conversely, in a slightly basic medium, such as, for example, blood where pH is approximately 7.35, the lipids may not be protonated and thus bear no charge. In some embodiments, the lipids may be protonated at a pH of at least about 9, 9.5, or 10. The ability of such a lipid to bear a charge is related to its intrinsic pKa. For example, the lipid may, independently, have a pKa in the range of from about 5.8 to about 6.2.

[0375] Neutral lipids function to stabilize and improve processing of the LNPs. Examples of suitable neutral lipids include a variety of neutral, uncharged or zwitterionic lipids. Examples of neutral phospholipids suitable for use in the present disclosure include, but are not limited to, 5-heptadecylbenzene-1,3-diol (resorcinol), dipalmitoylphosphatidylcholine (DPPC), distearoylphosphatidylcholine (DSPC), phosphocholine (DOPC), dimyristoylphosphatidylcholine (DMPC), phosphatidylcholine (PLPC), 1,2-distearoyl-sn-glycero-3-phosphocholine (DAPC), phosphatidylethanolamine (PE), egg phosphatidylcholine (EPC), dilauryloylphosphatidylcholine (DLPC), dimyristoylphosphatidylcholine (DMPC), 1-myristoyl-2-palmitoyl phosphatidylcholine (MPPC), 1-palmitoyl-2-myristoyl phosphatidylcholine (PMPC), 1-palmitoyl-2-stearoyl phosphatidylcholine (PSPC), 1,2-diarachidoyl-sn-glycero-3-phosphocholine (DBPC), 1-stearoyl-2-palmitoyl phosphatidylcholine (SPPC), 1,2-dieicosenoyl-sn-glycero-3-phosphocholine (DEPC), palmitoyloleoyl phosphatidylcholine (POPC), lysophosphatidyl choline, dioleoyl phosphatidylethanolamine (DOPE), dilinoleoylphosphatidylcholine distearoylphosphatidylethanolamine (DSPE), dimyristoyl phosphatidylethanolamine (DMPE), dipalmitoyl phosphatidylethanolamine (DPPE), palmitoyloleoyl phosphatidylethanolamine (POPE), lysophosphatidylethanolamine, and combinations thereof. For example, the neutral phospholipid may be selected from the group consisting of distearoylphosphatidylcholine (DSPC) and dimyristoyl phosphatidyl ethanolamine (DMPE).

[0376] Helper lipids include lipids that enhance transfection. The mechanism by which the helper lipid enhances transfection can include enhancing particle stability. In certain cases, the helper lipid can enhance membrane fusogenicity. Helper lipids include steroids, sterols, and alkyl resorcinols. Examples of suitable helper lipids suitable include cholesterol, 5-heptadecylresorcinol, and cholesterol hemisuccinate. In one example, the helper lipid may be cholesterol or cholesterol hemisuccinate.

[0377] Stealth lipids include lipids that alter the length of time the nanoparticles can exist in vivo. Stealth lipids may assist in the formulation process by, for example, reducing particle aggregation and controlling particle size. Stealth lipids may modulate pharmacokinetic properties of the LNP. Suitable stealth lipids include lipids having a hydrophilic head group linked to a lipid moiety.

[0378] The hydrophilic head group of stealth lipid can comprise, for example, a polymer moiety selected from polymers based on PEG (sometimes referred to as poly(ethylene oxide)), poly(oxazoline), poly(vinyl alcohol), poly(glycerol), poly(N-vinylpyrrolidone), polyaminoacids, and poly N-(2-hydroxypropyl)methacrylamide. The term PEG means any polyethylene glycol or other polyalkylene ether polymer. In certain LNP formulations, the PEG, is a PEG-2K, also termed PEG 2000, which has an average molecular weight of about 2,000 daltons. See, e.g., WO 2017/173054 A1, herein incorporated by reference in its entirety for all purposes.

[0379] The lipid moiety of the stealth lipid may be derived, for example, from diacylglycerol or diacylglycamide, including those comprising a dialkylglycerol or dialkylglycamide group having alkyl chain length independently comprising from about C4 to about C40 saturated or unsaturated carbon atoms, wherein the chain may comprise one or more functional groups such as, for example, an amide or ester. The dialkylglycerol or dialkylglycamide group can further comprise one or more substituted alkyl groups.

[0380] As one example, the stealth lipid may be selected from PEG-dilauroylglycerol, PEG-dimyristoylglycerol (PEG-DMG), PEG-dipalmitoylglycerol, PEG-distearoylglycerol (PEG-DSPE), PEG-dilaurylglycamide, PEG-dimyristylglycamide, PEG-dipalmitoylglycamide, and PEG-distearoylglycamide, PEG-cholesterol (1-[8′-(Cholest-5-en-3[beta]-oxy)carboxamido-3′,6′-dioxaoctanyl]carbamoyl-[omega]-methyl-poly(ethylene glycol), PEG-DMB (3,4-ditetradecoxylbenzyl-[omega]-methyl-poly(ethylene glycol)ether), 1,2-dimyristoyl-sn-glycero-3-phosphoethanolamine-N-[methoxy(polyethylene glycol)-2000](PEG2k-DMG), 1,2-distearoyl-sn-glycero-3-phosphoethanolamine-N-[methoxy(polyethylene glycol)-2000](PEG2k-DSPE), 1,2-distearoyl-sn-glycerol, methoxypoly ethylene glycol (PEG2k-DSG), poly(ethylene glycol)-2000-dimethacrylate (PEG2k-DMA), and 1,2-distearyloxypropyl-3-amine-N-[methoxy(polyethylene glycol)-2000](PEG2k-DSA). In one particular example, the stealth lipid may be PEG2k-DMG.

[0381] The LNPs can comprise different respective molar ratios of the component lipids in the formulation. The mol-% of the CCD lipid may be, for example, from about 30 mol-% to about 60 mol-%, from about 35 mol-% to about 55 mol-%, from about 40 mol-% to about 50 mol-%, from about 42 mol-% to about 47 mol %, or about 45%. The mol-% of the helper lipid may be, for example, from about 30 mol-% to about 60 mol-%, from about 35 mol-% to about 55 mol-%, from about 40 mol-% to about 50 mol-%, from about 41 mol-% to about 46 mol-%, or about 44 mol-%. The mol-% of the neutral lipid may be, for example, from about 1 mol-% to about 20 mol-%, from about 5 mol-% to about 15 mol-%, from about 7 mol-% to about 12 mol-%, or about 9 mol-%. The mol-% of the stealth lipid may be, for example, from about 1 mol-% to about 10 mol-%, from about 1 mol-% to about 5 mol-%, from about 1 mol-% to about 3 mol-%, about 2 mol-%, or about 1 mol-%.

[0382] The LNPs can have different ratios between the positively charged amine groups of the biodegradable lipid (N) and the negatively charged phosphate groups (P) of the nucleic acid to be encapsulated. This may be mathematically represented by the equation N/P. For example, the N/P ratio may be from about 0.5 to about 100, from about 1 to about 50, from about 1 to about 25, from about 1 to about 10, from about 1 to about 7, from about 3 to about 5, from about 4 to about 5, about 4, about 4.5, or about 5.

[0383] In some LNPs, the cargo can comprise Cas mRNA and gRNA. The Cas mRNA and gRNAs can be in different ratios. For example, the LNP formulation can include a ratio of Cas mRNA to gRNA nucleic acid ranging from about 25:1 to about 1:25, ranging from about 10:1 to about 1:10, ranging from about 5:1 to about 1:5, or about 1:1. Alternatively, the LNP formulation can include a ratio of Cas mRNA to gRNA nucleic acid from about 1:1 to about 1:5, or about 10:1. Alternatively, the LNP formulation can include a ratio of Cas mRNA to gRNA nucleic acid of about 1:10, 25:1, 10:1, 5:1, 3:1, 1:1, 1:3, 1:5, 1:10, or 1:25. Alternatively, the LNP formulation can include a ratio of Cas mRNA to gRNA nucleic acid of from about 1:1 to about 1:2. In specific examples, the ratio of Cas mRNA to gRNA can be about 1:1 or about 1:2.

[0384] Exemplary dosing of LNPs includes about 0.1, about 0.25, about 0.3, about 0.5, about 1, about 2, about 3, about 4, about 5, about 6, about 8, or about 10 mg/kg body weight (mpk) or about 0.1 to about 10, about 0.25 to about 10, about 0.3 to about 10, about 0.5 to about 10, about 1 to about 10, about 2 to about 10, about 3 to about 10, about 4 to about 10, about 5 to about 10, about 6 to about 10, about 8 to about 10, about 0.1 to about 8, about 0.1 to about 6, about 0.1 to about 5, about 0.1 to about 4, about 0.1 to about 3, about 0.1 to about 2, about 0.1 to about 1, about 0.1 to about 0.5, about 0.1 to about 0.3, about 0.1 to about 0.25, about 0.25 to about 8, about 0.3 to about 6, about 0.5 to about 5, about 1 to about 5, or about 2 to about 3 mg/kg body weight with respect to total RNA (Cas9 mRNA and gRNA) cargo content. Such LNPs can be administered, for example, intravenously. In one example, LNP doses between about 0.01 mg/kg and about 10 mg/kg, between about 0.1 and about 10 mg/kg, or between about 0.01 and about 0.3 mg/kg can be used. For example, LNP doses of about 0.01, about 0.03, about 0.1, about 0.3, about 1, about 3, or about 10 mg/kg can be used. Additional exemplary dosing of LNPs includes about 0.1, about 0.25, about 0.3, about 0.5, about 1, about 2, about 3, about 4, about 5, about 6, about 8, or about 10 mg/kg (mpk) body weight or about 0.1 to about 10, about 0.25 to about 10, about 0.3 to about 10, about 0.5 to about 10, about 1 to about 10, about 2 to about 10, about 3 to about 10, about 4 to about 10, about 5 to about 10, about 6 to about 10, about 8 to about 10, about 0.1 to about 8, about 0.1 to about 6, about 0.1 to about 5, about 0.1 to about 4, about 0.1 to about 3, about 0.1 to about 2, about 0.1 to about 1, about 0.1 to about 0.5, about 0.1 to about 0.3, about 0.1 to about 0.25, about 0.25 to about 8, about 0.3 to about 6, about 0.5 to about 5, about 1 to about 5, or about 2 to about 3 mg/kg body weight with respect to total RNA (Cas9 mRNA and gRNA) cargo content. Such LNPs can be administered, for example, intravenously. In one example, LNP doses between about 0.01 mg/kg and about 10 mg/kg, between about 0.1 and about 10 mg/kg, or between about 0.01 and about 0.3 mg/kg can be used. For example, LNP doses of about 0.01, about 0.03, about 0.1, about 0.3, about 0.5, about 1, about 2, about 3, or about 10 mg/kg can be used. In another example, LNP doses between about 0.5 and about 10, between about 0.5 and about 5, between about 0.5 and about 3, between about 1 and about 10, between about 1 and about 5, between about 1 and about 3, or between about 1 and about 2 mg/kg can be used.

[0385] The mode of delivery can be selected to decrease immunogenicity. For example, different components may be delivered by different modes (e.g., bi-modal delivery). These different modes may confer different pharmacodynamics or pharmacokinetic properties on the subject delivered molecule. For example, the different modes can result in different tissue distribution, different half-life, or different temporal distribution. Some modes of delivery (e.g., delivery of a nucleic acid vector that persists in a cell by autonomous replication or genomic integration) result in more persistent expression and presence of the molecule, whereas other modes of delivery are transient and less persistent (e.g., delivery of an RNA or a protein). Delivery of components in a more transient manner, for example as RNA, can ensure that the Cas/gRNA complex is only present and active for a short period of time and can reduce immunogenicity. Such transient delivery can also reduce the possibility of off-target modifications.

[0386] Administration in vivo can be by any suitable route including, for example, via intravitreal injection or subretinal injection. Significantly smaller amounts of the components (compared with systemic approaches) may exert an effect when administered locally (for example, subretinal or intravitreal) compared to when administered systemically (for example, intravenously). Local modes of administration may also reduce or eliminate the incidence of potentially toxic side effects that may occur when therapeutically effective amounts of a component are administered systemically.

[0387] Compositions comprising the nuclease agents (e.g., Cas9 mRNAs and guide RNAs or nucleic acids encoding the guide RNAs) and/or nucleic acid constructs disclosed herein can be formulated using one or more physiologically and pharmaceutically acceptable carriers, diluents, excipients or auxiliaries. The formulation can depend on the route of administration chosen. The term “pharmaceutically acceptable” means that the carrier, diluent, excipient, or auxiliary is compatible with the other ingredients of the formulation and not substantially deleterious to the recipient thereof.

[0388] The frequency of administration and the number of dosages can depend on the half-life of the nucleic acid constructs or nuclease agents (or nucleic acids encoding the nuclease agents) and the route of administration among other factors. The introduction of nucleic acids or proteins into the cell or animal can be performed one time or multiple times over a period of time. For example, the introduction can be performed only once over a period of time, at least two times over a period of time, at least three times over a period of time, at least four times over a period of time, at least five times over a period of time, at least six times over a period of time, at least seven times over a period of time, at least eight times over a period of time, at least nine times over a period of times, at least ten times over a period of time, at least eleven times, at least twelve times over a period of time, at least thirteen times over a period of time, at least fourteen times over a period of time, at least fifteen times over a period of time, at least sixteen times over a period of time, at least seventeen times over a period of time, at least eighteen times over a period of time, at least nineteen times over a period of time, or at least twenty times over a period of time.

[0389] Optionally, such methods can further comprise assessing expression and/or activity of the inserted retinoschisin coding sequence or the encoded retinoschisin protein in the animal or in a cell. Various methods can be used to identify cells having a targeted genetic modification. The screening can comprise a quantitative assay for assessing modification of allele (MOA) of a parental chromosome. For example, the quantitative assay can be carried out via a quantitative PCR, such as a real-time PCR (qPCR). The real-time PCR can utilize a first primer set that recognizes the target locus and a second primer set that recognizes a non-targeted reference locus. The primer set can comprise a fluorescent probe that recognizes the amplified sequence. Other examples of suitable quantitative assays include fluorescence-mediated in situ hybridization (FISH), comparative genomic hybridization, isothermic DNA amplification, quantitative hybridization to an immobilized probe(s), INVADER© Probes, TAQMAN® Molecular Beacon probes, or ECLIPSE™ probe technology (see, e.g., US 2005/0144655, herein incorporated by reference in its entirety for all purposes).

[0390] Next-generation sequencing (NGS) can also be used for screening. Next-generation sequencing can also be referred to as “NGS” or “massively parallel sequencing” or “high throughput sequencing.” NGS can be used as a screening tool in addition to the MOA assays to define the exact nature of the targeted genetic modification and whether it is consistent across cell types or tissue types or organ types.

[0391] Assessing modification of the target genomic locus in an animal can be in any cell type from any tissue or organ. For example, the assessment can be in multiple cell types from the same tissue or organ (e.g., eye) or in cells from multiple locations within the tissue or organ. This can provide information about which cell types within a target tissue or organ are being targeted or which sections of a tissue or organ are being reached by the nucleic acid construct. As another example, the assessment can be in multiple types of tissue or in multiple organs. In methods in which a particular tissue, organ, or cell type is being targeted, this can provide information about how effectively that tissue or organ is being targeted and whether there are off-target effects in other tissues or organs.

[0392] Methods for measuring expression of retinoschisin can include, for example, measuring protein expression. Such methods are well-known. Such methods can also comprise assessing expression of the mRNA encoded by the retinoschisin coding sequence. This measuring can be within the eye or particular cell types or regions within the eye (e.g., retinal cells such as photoreceptors).

[0393] One example of an assay that can be used is the BASESCOPE™ RNA in situ hybridization (ISH) assay, which a method that can quantify cell-specific edited transcripts, including single nucleotide changes, in the context of intact fixed tissue. The BASESCOPE™ RNA ISH assay can complement NGS and qPCR in characterization of gene editing. Whereas NGS/qPCR can provide quantitative average values of wild type and edited sequences, they provide no information on heterogeneity or percentage of edited cells within a tissue. The BASESCOPE™ ISH assay can provide a landscape view of an entire tissue and quantification of wild type versus edited transcripts with single-cell resolution, where the actual number of cells within the target tissue containing the edited mRNA transcript can be quantified. The BASESCOPE™ assay achieves single-molecule RNA detection using paired oligo (“ZZ”) probes to amplify signal without non-specific background. However, the BASESCOPE™ probe design and signal amplification system enables single-molecule RNA detection with a 1 ZZ probe and it can differentially detect single nucleotide edits and mutations in intact fixed tissue.

[0394] Assays for measuring activity of a retinoschisin protein can include, for example, optical coherence tomography (OCT) and electroretinogram (ERG) testing. OCT scans can be used to score retinal cavities and/or to measure retinal photoreceptor thickness). Other assays include optokinetic tests. Such methods are well-known. For example, if the cell or animal being modified is a cell with a mutation that is associated with or causes X-linked juvenile retinoschisis (e.g., an R141C mutation), such functional assays can be used to assess rescue of the disease phenotype. Optical coherence tomography (OCT) provides high-resolution cross-sectional images of the macular region. In individuals with XLRS, OCT reveals cystic spaces primarily in the inner nuclear and outer plexiform layers of the retina. Such functional testing can also include electroretinogram (ERG) testing, which are diagnostic tests that measure the electrical activity generated by neural and non-neuronal cells in the retina in response to a light stimulus. XLRS is associated with reduced phototopic and scotopic b-wave amplitudes in ERGs.

[0395] All patent filings, websites, other publications, accession numbers and the like cited above or below are incorporated by reference in their entirety for all purposes to the same extent as if each individual item were specifically and individually indicated to be so incorporated by reference. If different versions of a sequence are associated with an accession number at different times, the version associated with the accession number at the effective filing date of this application is meant. The effective filing date means the earlier of the actual filing date or filing date of a priority application referring to the accession number if applicable. Likewise, if different versions of a publication, website or the like are published at different times, the version most recently published at the effective filing date of the application is meant unless otherwise indicated. Any feature, step, element, embodiment, or aspect of the invention can be used in combination with any other unless specifically indicated otherwise. Although the present invention has been described in some detail by way of illustration and example for purposes of clarity and understanding, it will be apparent that certain changes and modifications may be practiced within the scope of the appended claims.

### BRIEF DESCRIPTION OF THE SEQUENCES

[0396] The nucleotide and amino acid sequences listed in the accompanying sequence listing are shown using standard letter abbreviations for nucleotide bases, and three-letter code for amino acids. The nucleotide sequences follow the standard convention of beginning at the 5′ end of the sequence and proceeding forward (i.e., from left to right in each line) to the 3′ end. Only one strand of each nucleotide sequence is shown, but the complementary strand is understood to be included by any reference to the displayed strand. When a nucleotide sequence encoding an amino acid sequence is provided, it is understood that codon degenerate variants thereof that encode the same amino acid sequence are also provided. The amino acid sequences follow the standard convention of beginning at the amino terminus of the sequence and proceeding forward (i.e., from left to right in each line) to the carboxy terminus.

TABLE 4
Description of Sequences.

| SEQ ID NO | Type | Description |
|---|---|---|
| 1 | Protein | Mouse Retinoschisin (UniProt Q9Z1L4) |
| 2 | Protein | Human Retinoschisin (UniProt O15537) |
| 3 | Protein | Human Retinoschisin R141C |
| 4 | Protein | Chimeric Mouse-Human Retinoschisin |
| 5 | Protein | Human Portion of Chimeric Human Retinoschisin |
| 6 | DNA | Human RS1 Coding Sequence (NCBI CCDS14187.1) |
| 7 | DNA | Mouse Rs1 Sequence in Hybrid cDNA |
| 8 | DNA | Human RS1 cDNA Exons 2-6 |
| 9 | DNA | Codon-Optimized Human RS1 cDNA Exons 2-6 |
| 10 | DNA | Reverse Complement of Codon-Optimized Human RS1 cDNA Exons 2-6 |
| 11 | DNA | T^{h} Hybrid RS1 cDNA |
| 12 | DNA | T^{mh} Hybrid RS1 cDNA |
| 13 | DNA | T^{h} Nucleotide Sequence (SA, hRS1, poly A) |
| 14 | DNA | T^{mh} Hybrid RS1 Sequence (SA, hRS1, poly A) |
| 15 | DNA | Fragment of Human RS1 Intron 1 with Splice Acceptor (V1) |
| 16 | DNA | Fragment of Human RS1 Intron 1 with Splice Acceptor (V1) |
| 17 | DNA | Mouse Splice Acceptor V1 |
| 18 | DNA | Mouse Splice Acceptor V2 |
| 19 | DNA | Reverse Complement of Mouse Splice Acceptor V1 |
| 20 | DNA | Reverse Complement of Mouse Splice Acceptor V2 |
| 21 | DNA | ADML Splice Acceptor |
| 22 | DNA | bGH Poly A |
| 23 | DNA | SV40 Poly A |
| 24 | DNA | Reverse Complement of SV40 PolyA |
| 25 | DNA | Human RSI PolyA |
| 26 | DNA | Cas9 DNA |
| 27 | Protein | Cas9 Protein |
| 28 | DNA | Cas9 cDNA |
| 29 | RNA | crRNA Tail |
| 30 | RNA | TracrRNA V1 |
| 31 | RNA | TracrRNA V2 |
| 32 | RNA | TracrRNA V3 |
| 33 | RNA | Guide RNA Scaffold V1 |
| 34 | RNA | Guide RNA Scaffold V2 |
| 35 | RNA | Guide RNA Scaffold V3 |
| 36 | RNA | Guide RNA Scaffold V4 |
| 37 | RNA | Guide RNA Scaffold V5 |
| 38 | RNA | Guide RNA Scaffold V6 |
| 39 | RNA | Guide RNA Scaffold V7 |
| 40 | DNA | Guide RNA Target Sequence Plus PAM V1 |
| 41 | DNA | Guide RNA Target Sequence Plus PAM V2 |
| 42 | DNA | Guide RNA Target Sequence Plus PAM V3 |
| 43 | RNA | Mouse Rs1 Intron 1 Guide RNA |
| 44 | DNA | Generic Modified sgRNA |
| 45 | DNA | pAAV hRs1_cDNA, HITI |
| 46 | DNA | pscAAV_Rs1_tandem. sgU |
| 47 | DNA | pAAV_mhRs1_sgU |
| 48 | Protein | Mouse Retinoschisin R141C |
| 49 | Protein | NLS v1 |
| 50 | Protein | NLS v2 |
| 51 | Protein | NLS v3 |
| 52 | RNA | crRNA Tail v2 |
| 53 | RNA | Guide RNA Scaffold V8 |
| 54-1895 | DNA | Human RS1 Intron 1 Guide RNA Target Sequences |
| 1896-3147 | DNA | Mouse Rs1 Intron 1 Guide RNA Target Sequences |
| 3148-4989 | RNA | Human RS1 Intron 1 Guide Sequences |
| 4990-6241 | RNA | Mouse Rs1 Intron 1 Guide Sequences |
| 6242 | Protein | Cas9 Protein |
| 6243 | RNA | Cas9 mRNA |
| 6244 | DNA | Cas9 DNA |
| 6245 | RNA | Cas9 mRNA |
| 6246 | Protein | Cas9 Protein |
| 6247 | DNA | HDR-1800 Construct |
| 6248 | DNA | HDR-900 Construct |
| 6249 | DNA | HDR-450 Construct |

### Examples

### Example 1. Insertion of RS1 Coding Sequence into Mouse Rs1 Locus in XLRS Mouse Model

[0397] In order to model potential X-linked juvenile retinoschisis therapy (XLRS) CRISPR therapeutics strategies in vivo, we generated a mouse line with constitutive expression of Cas9 protein in all tissues (Rosa^{Cas9}/⁺; see, e.g., US 2019/0032155 and WO 2019/028032, each of which is herein incorporated by reference in its entirety for all purposes) and crossed it to mice containing a mutant copy of murine retinoschisin (Rs1) (Rs1^{R141C}/^{Y}) to generate Rosa^{Cas9}/⁺. Rs1^{R141}/^{Y} mice. The mice with the Rs1R141C mutation, which causes intracellular retention of retinoschisin to replicate key features of the human condition, including intraretinal schisis, retinal degeneration, and a reduced ERG b-wave.

[0398] The Rs1 gene is a highly conserved extracellular protein involved in the cellular organization of the retina. It is assembled and secreted from photoreceptors and bipolar cells as a homo-oligomeric protein complex. Over 200 mutations have been detected in Rs1, many leading to early onset of macular degeneration due to a non-functional protein or the absence of protein secretion. Lack of functional Rs1 expression causes schisis within the retinal layers leading to the early and progressive vision loss associated with XLRS. To date, there are no publications reporting pre-clinical or clinical studies using Cas9 technology for XLRS treatment. Here, we describe an approach for the use of Cas9 in combination with adeno-associated virus (AAV) to rescue the non-secreting R141C variant of Rs1 in mice. The constructs are designed to be integrated into the endogenous Rs1 locus in the retina (e.g., photoreceptors), where the hybrid mouse-human RS1 transcript will be expressed through the endogenous Rs1 promoter.

[0399] Subretinal delivery of AAV serotype 7m8 has led to successful expression of transgenes (data not shown). While AAVs have the potential to persist ectopically for a year or more, we endeavor to develop a strategy for permanent rescue of mutant Rs1 phenotypes. To this end, three viral vectors were designed encoding WT human RS1 exons 2-6 (without a promoter) as well as a guide RNA targeting mouse Rs1 intron 1. The sequence of the guide RNA is set forth in SEQ ID NO: 43, and the guide RNA target sequence in mouse Rs1 intron 1 is set forth in SEQ ID NO: 2383. Upon injection of any one of these viruses into RosaCas9/+; Rs1R141C/Y mice, we expected the guide RNA expression to lead to cutting at the Rs1 locus and integration of the viral genome containing the human RSJ cDNA fragment. The mouse Rs1 locus is shown in FIG. 1. Mouse exon 1 would splice into human exon 2-6 cDNA (FIG. 2), and expression of the hybrid mouse human protein should prevent transcription of mutant mouse Rs1.

[0400] Viral vector version 1 (SEQ ID NO: 47) was generated by bidirectional insertion in a single stranded AAV (ssAAV) vector. Two hundred bases of RS1 human intron 1 (containing exon 2 splice signals) were placed in front of a cDNA encoding exons 2-6 of human RS1 transcript followed by bovine growth hormone (bGH) polyA (T^{h}). A second human cDNA was generated with mouse codon optimization and integrated into the vector in the opposite orientation. This sequence was flanked by 200 bp containing the mouse splice signals and an SV40 polyA (T^{mh}). The sequences were designed to be divergent enough so as to reduce the likelihood of viral transcripts self-annealing. Further, an sgRNA expression unit was added in between the transcripts (FIG. 3A). The benefit of this strategy is that the viral genome can be inserted in either orientation and still form a viable reading frame for allele rescue.

[0401] Viral vector version 2 (SEQ ID NO: 46) was generated by bidirectional insertion in a self-complimentary AAV (scAAV) vector. This version is configured just as version 1, with two differences. First, the sequence was incorporated into a self-complimentary AAV vector. Second, to comply with the maximum self-complimentary genome size of 2100 bp, the splice signal regions were reduced to 60 bp (FIG. 3A).

[0402] Viral vector version 3 (SEQ ID NO: 45) was designed for homology-independent targeted integration (HITI). HITI leverages the need for the Cas9 recognition sequence to have a protospacer adjacent motif (PAM). The construct was designed to express T^{h} and the same guide RNA targeting the Rs1 intron 1. However, where versions 1 and 2 do not contain guide RNA target sequences, version 3 is flanked by an inverted guide RNA target sequence on each side (FIG. 3B). Once the viral genome is double-stranded, it will express one guide RNA sequence that should simultaneously cause a double-strand break in mouse Rs1 intron 1 as well as on both sides of the viral genome, effectively cleaving off the ITR sequences. The liberated viral genome is now free to insert into the mouse genome in either orientation. However, if the cDNA integrates in the reverse orientation, the guide RNA target sequences should be reconstituted and available for further Cas9 cleavage. If the cDNA integrates in the desired orientation, the guide RNA target sequences will be destroyed, and the sequence locked in place.

[0403] While the Rs1 sequences of version 1 and 2 are near identical, the viral backbones may change the timing of double-stranded viral production and thus impact gene insertion efficiencies. An scAAV will become double stranded faster than an ssAAV due to differences in the mechanism by which the second strand is synthesized. Both ITRs in ssAAVs can act as replication origins and contain single-stranded nuclease domains that cut newly synthesized strands. Replication can be initiated from either ITR, so a mixture of the + strand and − strand will be generated. Once the polymerase gets to the other ITR, the synthesized strand is cleaved and released. The primary mechanism to synthesize the compliment strand is to use host-cell machinery. However, at a low level, the + and − strands synthesized by the virus may spontaneously anneal to create the double-stranded virus. In the case of scAAV, one of the two ITR sequences is mutated to remove the nuclease domain. The replication fork starts at the active ITR and moves through the mutant ITR, without being cleaved, and the synthesis continues on the opposite strand. The single-stranded synthesis containing both the + and − strand self-compliment to make the double-stranded virus.

[0404] Versions 1-3 were each able to mediate gene insertion at the mouse Rs1 locus in the Cas9 mouse background. In the pilot study, a small amount of virus was injected into right eye of each mouse, and the left eye was not injected as a control. Both retinas were harvested and cut in half. Half of each retina was used for non-homologous end joining (NHEJ) characterization at the intron 1 of mouse Rs1 locus. The other half was used to generate cDNA for NGS amplicon sequencing over the mutant region. Due to PCR efficiencies and bias, we were able to amplify each transcript variant, but we could not quantify the actual expression profiles. NHEJ characterization provides a clue to guide RNA activity as well as insertion activity. Detection of NHEJ implies an allele without gene insertion that will likely express the mutant mouse transcript. Detection of either modified transcript indicates that gene insertion has occurred.

[0405] Thirteen mice were injected in the right eyes: three for version 1, and five each for versions 2 and 3. All injected eyes had improved retinal organization as seen in optical coherence tomography (OCT) imaging. See FIG. 4. Scoring of retinal cavities shown in OCT scans (containing 61 images each) from 3 different locations of each eye was conducted based on the following preset criteria by three independent readers. A score of 1 was assigned if there were 1-4 cavities on at least one individual image. A score of 2 was assigned if there were ≥4 cavities on at least one individual image, but the cavities were not fused. A score of 3 was assigned if there were fused cavities on at least one individual image. A score of 4 was assigned if there were fused cavities on at least one individual image and the retina was stretched. The average scores for each treatment group were compared with a control group containing the pooled non-treated eyes by nonparametric Kruskal-Wallis one-way analysis of variance and Post hoc test Dunn's multiple comparisons test.

[0406] Next generation targeted resequencing amplicons were designed for the regions depicted in FIG. 3 (horizontal arrows) as these regions are distinct in the four expected sequence variants ((1) WT mouse, the mouse reference sequence not containing the R141C mutant; (2) mutant mouse, the mouse reference sequence harboring the R141C mutant; (3) humanized transcript 1, the human reference sequence; and (4) humanized transcript 2, the mouse codon-optimized human reference sequence). Mouse retinas were harvested from study mice and total mRNA was extracted from the tissues. mRNA was used to generate cDNA to act as a template for next generation sequencing (NGS) amplification. Target-specific oligos with incorporated barcodes for sequence identification were used to amplify all four variants per tissue. The PCR products from each mouse were normalized and pooled into a single tube for further preparation. The finalized library was loaded on to a MiSeq and the 2×300 program was used to sequence samples. Informatic codes were then used to deconvolute the samples and create a de novo sequence reference. The number of reads that matched each variant were quantified and the percentage was obtained by dividing the variant read count by the total read count. As expected, WT mouse sequences were only found in female Rosa^{Cas9}/⁺;Rs1^{R141C}/⁺ mice. The NGS results for the four expected sequence variants are shown in FIG. 5. PCR bias and efficiency are not accounted for. A separate amplicon was used to amplify the Rs1 intron 1 guide RNA target sequence. Reads that matched the mouse reference sequence or contained non-homologous end joining were quantified to assess how often the guide RNA cut without making an insertion. See FIGS. 6A and 6B. Bar graphs showing some of the data from the tables in FIG. 5 are shown in FIGS. 7A-7C for versions 1-3, respectively.

[0407] All mice showed varying levels of all transcripts, with more T^{h} reads than T^{mh} reads in all mice. As expected, mice with very high NHEJ rates had lower amounts of human transcripts present. While versions 1 and 2 had similar sequence profiles, version 3 had a greater presence of residual mutant mouse transcript. This was likely due to the need for a specific insertion orientation. While the guide RNA design should help to push the insertion towards the desired insertion, it is likely that Cas9 cleavage damaged the recognition sequences beyond the possibility of re-targeting. Additionally, a large insertion/deletion (indel) on the viral genome may have disrupted the splice signals and prevented proper expression.

### Example 2. Insertion of RS1 Coding Sequence into Human RS1 Locus in Human Retinoblastoma Cells

[0408] We next tested insertion of RS1 coding sequence into the human RS1 locus in WERI-Rb1 human retinoblastoma cells in vitro. The WERI-Rb1 cell line (ATCC® HTB 169TM) was derived from human retinoblastoma. Retinoblastoma cells are precursors of photoreceptors and are an appropriate in vitro photoreceptor cell model because photoreceptor cell lines are not available. The cells were characterized in-house with retinal specific cell markers by ICC and RT-PCR, which showed only cone-specific mRNAs/proteins but not their rod counterparts were found, suggesting that this neoplasm was of cone cell lineage. In addition, RS1 was reported to be expressed and released by WERI-Rb1 cells. We also detected RS1 expression at mRNA level and protein levels (data not shown). Lipid nanoparticles (LNPs) were formulated with one of six guide RNAs targeting intron 1 of the human RS1 and Cas9 mRNA (sequence set forth in SEQ ID NO 6?41)

TABLE 5
Human RS1 Guide RNAs.

| | Guide RNA | | |
|---|---|---|---|
| | Target Sequence | | SEQ |
| gRNA | (5′ to 3′) | Direction | ID NO |
| hG1 | CTGTATCTTCTTAGCCAGTA | + | 57 |
| hG2 | CCCTTTTGTACGTTTTTTAA | + | 56 |
| hG3 | AAAAAAGGACTTGACATGCA | + | 65 |
| hG4 | AGAGCTTTGGCCGAGGACGA | + | 1210 |
| hG5 | TCTAGGACTTCTTCGCATCG | − | 1203 |
| hG6 | AGTCTGAGGCTGGGGCAACT | − | 581 |

[0409] In a first experiment, human retinoblastoma cells in suspension were transduced with approximately 5e5 MOI of AAV donor (viral vector versions 1 and 2 from Example 1), and CRISPR/Cas9 LNPs were administered 2 hours post-infection. All LNPs were dosed at 500 ng per well (48-well plate), except the “high” samples, which were dosed at 1000 ng LNP. Complete gene expression analysis by RT-qPCR was then done. RT-qPCR was performed by harvesting the total RNA from samples and treating them with DNAse to degrade all DNA contained in the samples. Next, the RNA samples were subjected to reverse transcription to create cDNA for all mRNA contained in the sample. Target specific TaqMan assays were then used to quantify the unique RS1 sequences expressed in the cells. RNA was harvested 72 hours post-infection. A no reverse transcription control was completed by harvesting the total RNA and DNAase treating as above. For the control, the reverse transcription polymerase was replaced with water such that no cDNA should be generated. Reverse transcribed and control non-reverse transcribed samples were run with a housekeeping gene (DROSHA). Results for viral vector version 1 (bidirectional insertion in a single stranded AAV (ssAAV) vector) are shown in FIG. 8A. Results for viral vector version 1 (bidirectional insertion in a self-complimentary AAV (scAAV) vector) are shown in FIG. 8B. These results are shown as delta Ct in order to normalize differences in RNA quantity and quality. The lower the number, the higher the expression of the target sequence. These results indicate robust expression of the introduced sequences. TaqMan assays and viral sequences were optimized to reduce cross-detection of the endogenous human RS1 expression. In a second experiment, human retinoblastoma cells in suspension were transduced with approximately 5e5 MOI of AAV donor (viral vector versions 1 and 2 from Example 1), and CRISPR/Cas9 LNPs were administered 2 hours prior to infection. All LNPs were dosed at 500 ng per well (48-well plate), except the “high” samples, which were dosed at 1000 ng LNP. Complete gene expression analysis by RT-qPCR was then done. Results for viral vector version 1 (bidirectional insertion in a single stranded AAV (ssAAV) vector) are shown in FIG. 9A. Results for viral vector version 1 (bidirectional insertion in a self-complimentary AAV (scAAV) vector) are shown in FIG. 9B. These results are shown as delta Ct in order to normalize differences in RNA quantity and quality. The lower the number, the higher the expression of the target sequence. These results indicate robust expression of the introduced sequences. TaqMan assays and viral sequences were optimized to reduce cross-detection of the endogenous human RS1 expression.

### Example 3. Insertion of RS1 Coding Sequence into Mouse Rs1 Locus in XLRS Mouse Model via Homologous Recombination

[0410] In order to model potential X-linked juvenile retinoschisis therapy (XLRS) CRISPR therapeutics strategies in vivo, we use the mouse line described in Example 1 with constitutive expression of Cas9 protein in all tissues crossed to mice containing a mutant copy of murine retinoschisin (Rs1) (Rosa^{Cas9}/⁺; Rs1^{R141C}/^{Y} mice). CRISPR/Cas9 is used in combination with adeno-associated virus (AAV) to rescue the non-secreting R141C variant of Rs1 in mice. The constructs are designed to be integrated into the endogenous Rs1 locus in the retina (e.g., photoreceptors) via homologous recombination, where the hybrid mouse-human RS1 transcript will be expressed through the endogenous Rs1 promoter. The mice are at the age of P14 when the retina is still undergoing mitosis, cellular differentiation, and maturation. Injection is during mitosis of the retina, and the evaluation is post-mitosis at 2 months post-injection.

[0411] Three viral vectors were designed encoding WT human RS1 exons 2-6 (without a promoter) as well as a guide RNA targeting mouse Rs1 intron 1 (guide RNA target sequence set forth in SEQ ID NO: 2887), with all of these elements flanked by homology arms. See FIG. 10. These elements are flanked by an inverted guide RNA target sequence on each side. Once the viral genome is double-stranded, it will express one guide RNA sequence that simultaneously causes a double-strand break in mouse Rs1 intron 1 as well as on both sides of the viral genome, effectively cleaving off the ITR sequences. The homology arms in the first viral vector are approximately 1800 bp each, the homology arms in the second viral vector are approximately 900 bp each, and the homology arms in the third viral vector are approximately 450 bp each. The sequences for the three vectors are set forth in SEQ ID NOS: 6247-6249, respectively. Upon injection of any one of these viruses into the eye of RosaCas9/+; Rs1R141C/Y mice, guide RNA expression leads to cutting at the Rs1 locus and homologous recombination with the viral genome containing the human RS1 cDNA fragment. The mouse Rs1 locus is shown in FIG. 1. Mouse exon 1 splices into human exon 2-6 cDNA (FIG. 2), and expression of the hybrid mouse human protein prevents transcription of mutant mouse Rs1.

[0412] Retinas are harvested and cut in half. Half of each retina is used for non-homologous end joining (NHEJ) characterization at the intron 1 of mouse Rs1 locus. The other half is used to generate cDNA for NGS amplicon sequencing over the mutant region. NHEJ characterization provides information on guide RNA activity as well as insertion activity. Detection of NHEJ implies an allele without gene insertion that will likely express the mutant mouse transcript. Detection of the inserted transcript indicates that gene insertion has occurred.

[0413] Retinal organization is assessed by optical coherence tomography (OCT) imaging. Scoring of retinal cavities in OCT scans is conducted based on the following preset criteria by three independent readers. A score of 1 is assigned if there are 1-4 cavities on at least one individual image. A score of 2 is assigned if there are ≥4 cavities on at least one individual image, but the cavities are not fused. A score of 3 is assigned if there are fused cavities on at least one individual image. A score of 4 is assigned if there are fused cavities on at least one individual image and the retina is stretched. The average scores for each treatment group are compared with a control group containing the pooled non-treated eyes by nonparametric Kruskal-Wallis one-way analysis of variance and Post hoc test Dunn's multiple comparisons test.

[0414] Mouse retinas are harvested from study mice, and total mRNA is extracted from the tissues. mRNA is used to generate cDNA to act as a template for next generation sequencing (NGS) amplification. Target-specific oligos with incorporated barcodes for sequence identification are used to amplify all variants per tissue. The PCR products from each mouse are normalized and pooled into a single tube for further preparation. The finalized library is loaded on to a MiSeq, and the 2×300 program is used to sequence samples. Informatic codes are then used to deconvolute the samples and create a de novo sequence reference. The number of reads that match each variant are quantified, and the percentage is obtained by dividing the variant read count by the total read count.

### Example 4. Insertion of RS1 Coding Sequence into Human RS1 Locus in Human Retinoblastoma Cells via Homologous Recombination

[0415] We next test insertion of RS1 coding sequence into the human RS1 locus via homologous recombination in human retinoblastoma cells in vitro. Lipid nanoparticles (LNPs) are formulated with guide RNAs targeting intron 1 of the human RS1 and Cas9 mRNA. In a first experiment, human retinoblastoma cells in suspension are transduced with approximately 5e5 MOI of AAV donor (viral vectors from Example 3, but with human RS1 homology arms), and CRISPR/Cas9 LNPs are administered 2 hours post-infection. All LNPs are dosed at 500 ng per well or 1000 ng per well. Complete gene expression analysis by RT-qPCR is then done. In a second experiment, human retinoblastoma cells in suspension are transduced with approximately 5e5 MOI of AAV donor (viral vectors from Example 3, but with human RS1 homology arms), and CRISPR/Cas9 LNPs were administered 2 hours prior to infection. All LNPs were dosed at 500 ng per well or 1000 ng per well. Complete gene expression analysis by RT-qPCR is then done.

The application's sequence listing, which the Patent Office published only in electronic form, follows.

SEQUENCE LISTING (6249 sequences)

SEQ ID NO: 1 - protein, 224 aa, Mus musculus
MPHKIEGFFLLLLFGYEATLGLSSTEDEGEDPWYQKACKCDCQVGANALWSAGATSLDCIPECPYHKPLGFESGEVTPDQITCSNPEQYVGWYSSWTANKARLNSQGFGCAWLSKYQDSSQWLQIDLKEIKVISGILTQGRCDIDEWVTKYSVQYRTDERLNWIYYKDQTGNNRVFYGNSDRSSTVQNLLRPPIISRFIRLIPLGWHVRIAIRMELLECASKCA

SEQ ID NO: 2 - protein, 224 aa, Homo sapiens
MSRKIEGFLLLLLFGYEATLGLSSTEDEGEDPWYQKACKCDCQGGPNALWSAGATSLDCIPECPYHKPLGFESGEVTPDQITCSNPEQYVGWYSSWTANKARLNSQGFGCAWLSKFQDSSQWLQIDLKEIKVISGILTQGRCDIDEWMTKYSVQYRTDERLNWIYYKDQTGNNRVFYGNSDRTSTVQNLLRPPIISRFIRLIPLGWHVRIAIRMELLECVSKCA

SEQ ID NO: 3 - protein, 224 aa, Homo sapiens
MSRKIEGFLLLLLFGYEATLGLSSTEDEGEDPWYQKACKCDCQGGPNALWSAGATSLDCIPECPYHKPLGFESGEVTPDQITCSNPEQYVGWYSSWTANKARLNSQGFGCAWLSKFQDSSQWLQIDLKEIKVISGILTQGCCDIDEWMTKYSVQYRTDERLNWIYYKDQTGNNRVFYGNSDRTSTVQNLLRPPIISRFIRLIPLGWHVRIAIRMELLECVSKCA

SEQ ID NO: 4 - protein, 224 aa, synthetic construct
MPHKIEGFFLLLLFGYEATLGLSSTEDEGEDPWYQKACKCDCQGGPNALWSAGATSLDCIPECPYHKPLGFESGEVTPDQITCSNPEQYVGWYSSWTANKARLNSQGFGCAWLSKFQDSSQWLQIDLKEIKVISGILTQGRCDIDEWMTKYSVQYRTDERLNWIYYKDQTGNNRVFYGNSDRTSTVQNLLRPPIISRFIRLIPLGWHVRIAIRMELLECVSKCA

SEQ ID NO: 5 - protein, 206 aa, Homo sapiens
TLGLSSTEDEGEDPWYQKACKCDCQGGPNALWSAGATSLDCIPECPYHKPLGFESGEVTPDQITCSNPEQYVGWYSSWTANKARLNSQGFGCAWLSKFQDSSQWLQIDLKEIKVISGILTQGRCDIDEWMTKYSVQYRTDERLNWIYYKDQTGNNRVFYGNSDRTSTVQNLLRPPIISRFIRLIPLGWHVRIAIRMELLECVSKCA

SEQ ID NO: 6 - DNA, 675 bp, Homo sapiens
  source 1..675: mol_type = other DNA
atgtcacgcaagatagaaggctttttgttattacttctctttggctatgaagccacattgggattatcgtctaccgaggatgaaggcgaggacccctggtaccaaaaagcatgcaagtgcgattgccaaggaggacccaatgctctgtggtctgcaggtgccacctccttggactgtataccagaatgcccatatcacaagcctctgggtttcgagtcaggggaggtcacaccggaccagatcacctgctctaacccggagcagtatgtgggctggtattcttcgtggactgcaaacaaggcccggctcaacagtcaaggctttgggtgtgcctggctctccaagttccaggacagtagccagtggttacagatagatctgaaggagatcaaagtgatttcagggatcctcacccaggggcgctgtgacatcgatgagtggatgaccaagtacagcgtgcagtacaggaccgatgagcgcctgaactggatttactacaaggaccagactggaaacaaccgggtcttctatggcaactcggaccgcacctccacggttcagaacctgctgcggccccccatcatctcccgcttcatccgcctcatcccgctgggctggcacgtccgcattgccatccggatggagctgctggagtgcgtcagcaagtgtgcctga

SEQ ID NO: 7 - DNA, 52 bp, Mus musculus
  source 1..52: mol_type = other DNA
atgccacacaagattgaaggcttcttcttgttacttctctttggctatgaag

SEQ ID NO: 8 - DNA, 623 bp, Homo sapiens
  source 1..623: mol_type = other DNA
ccacattgggattatcgtctaccgaggatgaaggcgaggacccctggtaccaaaaagcatgcaagtgcgattgccaaggaggacccaatgctctgtggtctgcaggtgccacctccttggactgtataccagaatgcccatatcacaagcctctgggtttcgagtcaggggaggtcacaccggaccagatcacctgctctaacccggagcagtatgtgggctggtattcttcgtggactgcaaacaaggcccggctcaacagtcaaggctttgggtgtgcctggctctccaagttccaggacagtagccagtggttacagatagatctgaaggagatcaaagtgatttcagggatcctcacccaggggcgctgtgacatcgatgagtggatgaccaagtacagcgtgcagtacaggaccgatgagcgcctgaactggatttactacaaggaccagactggaaacaaccgggtcttctatggcaactcggaccgcacctccacggttcagaacctgctgcggccccccatcatctcccgcttcatccgcctcatcccgctgggctggcacgtccgcattgccatccggatggagctgctggagtgcgtcagcaagtgtgcctga

SEQ ID NO: 9 - DNA, 623 bp, synthetic construct
  source 1..623: mol_type = other DNA
ccacactgggcctgagcagcacagaagatgaaggcgaggacccctggtatcagaaagcctgcaagtgcgactgtcaaggcggccctaatgctctttggagcgctggcgctacaagcctggactgcatccctgagtgcccctaccataagcctctgggcttcgagagcggcgaagtgacccctgaccagatcacctgtagcaaccccgagcagtacgtcggctggtactctagctggacagccaacaaggccagactgaacagccaaggcttcggctgtgcctggctgagcaagttccaggactctagccagtggctgcagatcgacctgaaagagatcaaagtcatcagcggcatcctgacacagggcagatgcgacatcgacgagtggatgaccaagtacagcgtgcagtacagaaccgacgagagactgaactggatctactacaaggaccagaccggcaacaacagagtgttctacggcaacagcgacagaaccagcaccgtgcagaatctgctgaggcctcctatcatctccagattcatcagactgatccctctcggctggcacgtgcggatcgccatcagaatggaactgctggaatgcgtgtccaagtgcgcctga

SEQ ID NO: 10 - DNA, 623 bp, synthetic construct
  source 1..623: mol_type = other DNA
tcaggcgcacttggacacgcattccagcagttccattctgatggcgatccgcacgtgccagccgagagggatcagtctgatgaatctggagatgataggaggcctcagcagattctgcacggtgctggttctgtcgctgttgccgtagaacactctgttgttgccggtctggtccttgtagtagatccagttcagtctctcgtcggttctgtactgcacgctgtacttggtcatccactcgtcgatgtcgcatctgccctgtgtcaggatgccgctgatgactttgatctctttcaggtcgatctgcagccactggctagagtcctggaacttgctcagccaggcacagccgaagccttggctgttcagtctggccttgttggctgtccagctagagtaccagccgacgtactgctcggggttgctacaggtgatctggtcaggggtcacttcgccgctctcgaagcccagaggcttatggtaggggcactcagggatgcagtccaggcttgtagcgccagcgctccaaagagcattagggccgccttgacagtcgcacttgcaggctttctgataccaggggtcctcgccttcatcttctgtgctgctcaggcccagtgtgg

SEQ ID NO: 11 - DNA, 675 bp, synthetic construct
  misc_feature 1..52: note = Mouse Sequence
  misc_feature 53..675: note = Human Sequence
  source 1..675: mol_type = other DNA
atgccacacaagattgaaggcttcttcttgttacttctctttggctatgaagccacattgggattatcgtctaccgaggatgaaggcgaggacccctggtaccaaaaagcatgcaagtgcgattgccaaggaggacccaatgctctgtggtctgcaggtgccacctccttggactgtataccagaatgcccatatcacaagcctctgggtttcgagtcaggggaggtcacaccggaccagatcacctgctctaacccggagcagtatgtgggctggtattcttcgtggactgcaaacaaggcccggctcaacagtcaaggctttgggtgtgcctggctctccaagttccaggacagtagccagtggttacagatagatctgaaggagatcaaagtgatttcagggatcctcacccaggggcgctgtgacatcgatgagtggatgaccaagtacagcgtgcagtacaggaccgatgagcgcctgaactggatttactacaaggaccagactggaaacaaccgggtcttctatggcaactcggaccgcacctccacggttcagaacctgctgcggccccccatcatctcccgcttcatccgcctcatcccgctgggctggcacgtccgcattgccatccggatggagctgctggagtgcgtcagcaagtgtgcctga

SEQ ID NO: 12 - DNA, 675 bp, synthetic construct
  misc_feature 1..52: note = Mouse Sequence
  misc_feature 53..675: note = Human Sequence
  source 1..675: mol_type = other DNA
atgccacacaagattgaaggcttcttcttgttacttctctttggctatgaagccacactgggcctgagcagcacagaagatgaaggcgaggacccctggtatcagaaagcctgcaagtgcgactgtcaaggcggccctaatgctctttggagcgctggcgctacaagcctggactgcatccctgagtgcccctaccataagcctctgggcttcgagagcggcgaagtgacccctgaccagatcacctgtagcaaccccgagcagtacgtcggctggtactctagctggacagccaacaaggccagactgaacagccaaggcttcggctgtgcctggctgagcaagttccaggactctagccagtggctgcagatcgacctgaaagagatcaaagtcatcagcggcatcctgacacagggcagatgcgacatcgacgagtggatgaccaagtacagcgtgcagtacagaaccgacgagagactgaactggatctactacaaggaccagaccggcaacaacagagtgttctacggcaacagcgacagaaccagcaccgtgcagaatctgctgaggcctcctatcatctccagattcatcagactgatccctctcggctggcacgtgcggatcgccatcagaatggaactgctggaatgcgtgtccaagtgcgcctga

SEQ ID NO: 13 - DNA, 1073 bp, synthetic construct
  misc_feature 1..224: note = Intron with Splice Acceptor
  misc_feature 225..847: note = Human RS1 Sequence
  misc_feature 848..1073: note = bGH polyA
  source 1..1073: mol_type = other DNA
ctataatgatgatcttgttctttctgtttaattttactgtccctagcttcttagcatctgcggatgtttttcctggcagatatttactcaccatgacttcttccagaaggggtgttggtagctttcatgtgactatttctatttcacttttccatgtaacgagtgatgctgttggatttctctttcattaattagattttttctgtctcatccttttgctttagccacattgggattatcgtctaccgaggatgaaggcgaggacccctggtaccaaaaagcatgcaagtgcgattgccaaggaggacccaatgctctgtggtctgcaggtgccacctccttggactgtataccagaatgcccatatcacaagcctctgggtttcgagtcaggggaggtcacaccggaccagatcacctgctctaacccggagcagtatgtgggctggtattcttcgtggactgcaaacaaggcccggctcaacagtcaaggctttgggtgtgcctggctctccaagttccaggacagtagccagtggttacagatagatctgaaggagatcaaagtgatttcagggatcctcacccaggggcgctgtgacatcgatgagtggatgaccaagtacagcgtgcagtacaggaccgatgagcgcctgaactggatttactacaaggaccagactggaaacaaccgggtcttctatggcaactcggaccgcacctccacggttcagaacctgctgcggccccccatcatctcccgcttcatccgcctcatcccgctgggctggcacgtccgcattgccatccggatggagctgctggagtgcgtcagcaagtgtgcctgactgtgccttctagttgccagccatctgttgtttgcccctcccccgtgccttccttgaccctggaaggtgccactcccactgtcctttcctaataaaatgaggaaattgcatcgcattgtctgagtaggtgtcattctattctggggggtggggtggggcaggacagcaagggggaggattgggaagacaatagcaggcatgctggggatgcggtgggctctatggc

SEQ ID NO: 14 - DNA, 1028 bp, synthetic construct
  misc_feature 1..183: note = Intron with Splice Acceptor
  misc_feature 184..806: note = Mouse-Codon-Optimized Human RS1
  misc_feature 807..1028: note = SV40 polyA
  source 1..1028: mol_type = other DNA
gctgtactgcaccctgctttgctatattaatatattttccataattctataagaaaaaacaacagtcattgccatccttttcctccctccagaatgagctccttaatctctatggcattgttttcattttgccttctttcctttcttaatttcattttttccctctcttgttcttttgctcagccacactgggcctgagcagcacagaagatgaaggcgaggacccctggtatcagaaagcctgcaagtgcgactgtcaaggcggccctaatgctctttggagcgctggcgctacaagcctggactgcatccctgagtgcccctaccataagcctctgggcttcgagagcggcgaagtgacccctgaccagatcacctgtagcaaccccgagcagtacgtcggctggtactctagctggacagccaacaaggccagactgaacagccaaggcttcggctgtgcctggctgagcaagttccaggactctagccagtggctgcagatcgacctgaaagagatcaaagtcatcagcggcatcctgacacagggcagatgcgacatcgacgagtggatgaccaagtacagcgtgcagtacagaaccgacgagagactgaactggatctactacaaggaccagaccggcaacaacagagtgttctacggcaacagcgacagaaccagcaccgtgcagaatctgctgaggcctcctatcatctccagattcatcagactgatccctctcggctggcacgtgcggatcgccatcagaatggaactgctggaatgcgtgtccaagtgcgcctgacagacatgataagatacattgatgagtttggacaaaccacaactagaatgcagtgaaaaaaatgctttatttgtgaaatttgtgatgctattgctttatttgtaaccattataagctgcaataaacaagttaacaacaacaattgcattcattttatgtttcaggttcagggggaggtgtgggaggttttttaaagcaagtaaaacctctacaaatgtggta

SEQ ID NO: 15 - DNA, 224 bp, Homo sapiens
  source 1..224: mol_type = other DNA
ctataatgatgatcttgttctttctgtttaattttactgtccctagcttcttagcatctgcggatgtttttcctggcagatatttactcaccatgacttcttccagaaggggtgttggtagctttcatgtgactatttctatttcacttttccatgtaacgagtgatgctgttggatttctctttcattaattagattttttctgtctcatccttttgctttag

SEQ ID NO: 16 - DNA, 60 bp, Homo sapiens
  source 1..60: mol_type = other DNA
gatgctgttggatttctctttcattaattagattttttctgtctcatccttttgctttag

SEQ ID NO: 17 - DNA, 183 bp, Mus musculus
  source 1..183: mol_type = other DNA
gctgtactgcaccctgctttgctatattaatatattttccataattctataagaaaaaacaacagtcattgccatccttttcctccctccagaatgagctccttaatctctatggcattgttttcattttgccttctttcctttcttaatttcattttttccctctcttgttcttttgctcag

SEQ ID NO: 18 - DNA, 63 bp, Mus musculus
  source 1..63: mol_type = other DNA
ttttcattttgccttctttcctttcttaatttcattttttccctctcttgttcttttgctcag

SEQ ID NO: 19 - DNA, 183 bp, Mus musculus
  source 1..183: mol_type = other DNA
ctgagcaaaagaacaagagagggaaaaaatgaaattaagaaaggaaagaaggcaaaatgaaaacaatgccatagagattaaggagctcattctggagggaggaaaaggatggcaatgactgttgttttttcttatagaattatggaaaatatattaatatagcaaagcagggtgcagtacagc

SEQ ID NO: 20 - DNA, 63 bp, Mus musculus
  source 1..63: mol_type = other DNA
ctgagcaaaagaacaagagagggaaaaaatgaaattaagaaaggaaagaaggcaaaatgaaaa

SEQ ID NO: 21 - DNA, 96 bp, synthetic construct
  source 1..96: mol_type = other DNA
gttgaccagctcggcggtgacctgcacgtctagggcgcagtagtccagggtttccttgatgatgtcatacttatcctgtcccttttttttccacag

SEQ ID NO: 22 - DNA, 226 bp, synthetic construct
  source 1..226: mol_type = other DNA
ctgtgccttctagttgccagccatctgttgtttgcccctcccccgtgccttccttgaccctggaaggtgccactcccactgtcctttcctaataaaatgaggaaattgcatcgcattgtctgagtaggtgtcattctattctggggggtggggtggggcaggacagcaagggggaggattgggaagacaatagcaggcatgctggggatgcggtgggctctatggc

SEQ ID NO: 23 - DNA, 222 bp, synthetic construct
  source 1..222: mol_type = other DNA
cagacatgataagatacattgatgagtttggacaaaccacaactagaatgcagtgaaaaaaatgctttatttgtgaaatttgtgatgctattgctttatttgtaaccattataagctgcaataaacaagttaacaacaacaattgcattcattttatgtttcaggttcagggggaggtgtgggaggttttttaaagcaagtaaaacctctacaaatgtggta

SEQ ID NO: 24 - DNA, 222 bp, synthetic construct
  source 1..222: mol_type = other DNA
taccacatttgtagaggttttacttgctttaaaaaacctcccacacctccccctgaacctgaaacataaaatgaatgcaattgttgttgttaacttgtttattgcagcttataatggttacaaataaagcaatagcatcacaaatttcacaaataaagcatttttttcactgcattctagttgtggtttgtccaaactcatcaatgtatcttatcatgtctg

SEQ ID NO: 25 - DNA, 2094 bp, synthetic construct
  source 1..2094: mol_type = other DNA
tgcctgcctcagctcggcgcctgccagggggtgactggcacagagcgggccgtaggggaccccctcacacaccaccgagatggacagggctatatttcgcaaagcaattgtaactgcagtgctgggtagataatttttttttttttaagatatagctttctgatttcaatgaaataaaaatgaacttattccccactcagggccagagaaagtcagaacaaagaaaatgtccccgaaacgaattttcttacaaaagcctaagtagcaggggtaattttctgctcattttttgtctcagtgatactgtgaaaggtgcagtctcaggggaacacaaagcagccctgataatttgaaaattcatttgctttaccacattcaagacagaaacatacagtttcctaaagcctggctttgaatgcagaagggagcagctcctcctagttaagtttccactaaatcatcgccaaagaggacttcagagccctggggaggcagctgagggtctcaagggtgactgggtggcagggatgagtgcggtgggtgagaatcccggtgccctgagaggctatacgtgacaaatgaccaaaagcccaaggtaggggagtttcctctgctcacagttcttaccttcaaggcggatctgggcttccaccctcatgaacacagggattggggagggaccagagcgcccaatacacacagctccattatgcaatccattccagcaaattccccgtgtctgtggtcaccatttaggtgatcatacaggacaggctgcacatctcagtatatgtagggaccccaaatgaccacaacacagtacaattgccctttacctagggctaccatttcctagcaaaccaaacatagttcgagaacagctggcccaggagctaccactggctactcagaggaggctcattagctggctacatgcttcgcaggaagtgggaaggactcacatcataaaaaggaccatgtagctttttccctgaaagcttctcaccctccaccctctgccttgcaatacgcaaactgcgcctgctcctgaaaagctctctgggaaggaatgggcctggctttccgttcctggaggcggcgccttagattgggaggcctcattggccacttagagcgcagcctgagtttccaggccccttcctgggagaggctgttaacacgggggaggggcaggagagggatatggagagcaggtggtggaatcagaggacgaggctgctctaaagactgttctggccccagacacagggtagtctttgctagcagctcatttccgagttacttttcattttcaaatgccaaggcaagtgactagactcgcgctaatacagtgctggacaacacattcaccttttctgtgaacaggcagccttctaaaagccccaaacatccttcttgatgctttgggggctcaattattttatatccaacccagcatctttctagtccctatgctgtatgcttgaacttcggaaaatgcttttccccgcccaatcttctctcaaatataaacacatcacacagggtgttgggggtggggggggggggtggggggacttatccctggccttaggacacaggacaaatctattttggatagaaatgcctgaacagagacccttatttggaaaggtgaattaactttggtcacgacatggactgtcagacaaaatggcagtatcctaagagttaaggcacatcaaacacaggagtcgagagagtgcagttcagggaaaaaggagaggaggaaacagtgaggcagggagaaaggctttccaaataagagttcatgttggaaacttttgtcacggctttattgagattaagttcacatacaatttgtatccatttaaagtatacaatttgatgacttttggtatattcagagttgtgcaaccattatcactagatcaattttagaaagtttatcaccccaaagagaaatcctgcacccatcagccaacactccccaacccatcggccaccccaagccctctgcaaccacgaatcgactgtctctgtagattggccttctggacgttctacataaatgaaatcatatagtatgtggta

SEQ ID NO: 26 - DNA, 4176 bp, synthetic construct
  source 1..4176: mol_type = other DNA
atggacaagcccaagaaaaagcggaaagtgaagtacagcatcggcctggacatcggcaccaactctgtgggctgggccgtgatcaccgacgagtacaaggtgcccagcaagaaattcaaggtgctgggcaacaccgacaggcacagcatcaagaagaacctgatcggcgccctgctgttcgacagcggcgaaacagccgaggccaccagactgaagagaaccgccagaagaagatacaccaggcggaagaacaggatctgctatctgcaagagatcttcagcaacgagatggccaaggtggacgacagcttcttccacagactggaagagtccttcctggtggaagaggacaagaagcacgagagacaccccatcttcggcaacatcgtggacgaggtggcctaccacgagaagtaccccaccatctaccacctgagaaagaaactggtggacagcaccgacaaggccgacctgagactgatctacctggccctggcccacatgatcaagttcagaggccacttcctgatcgagggcgacctgaaccccgacaacagcgacgtggacaagctgttcatccagctggtgcagacctacaaccagctgttcgaggaaaaccccatcaacgccagcggcgtggacgccaaggctatcctgtctgccagactgagcaagagcagaaggctggaaaatctgatcgcccagctgcccggcgagaagaagaacggcctgttcggcaacctgattgccctgagcctgggcctgacccccaacttcaagagcaacttcgacctggccgaggatgccaaactgcagctgagcaaggacacctacgacgacgacctggacaacctgctggcccagatcggcgaccagtacgccgacctgttcctggccgccaagaacctgtctgacgccatcctgctgagcgacatcctgagagtgaacaccgagatcaccaaggcccccctgagcgcctctatgatcaagagatacgacgagcaccaccaggacctgaccctgctgaaagctctcgtgcggcagcagctgcctgagaagtacaaagaaatcttcttcgaccagagcaagaacggctacgccggctacatcgatggcggcgctagccaggaagagttctacaagttcatcaagcccatcctggaaaagatggacggcaccgaggaactgctcgtgaagctgaacagagaggacctgctgagaaagcagagaaccttcgacaacggcagcatcccccaccagatccacctgggagagctgcacgctatcctgagaaggcaggaagatttttacccattcctgaaggacaaccgggaaaagatcgagaagatcctgaccttcaggatcccctactacgtgggccccctggccagaggcaacagcagattcgcctggatgaccagaaagagcgaggaaaccatcaccccctggaacttcgaggaagtggtggacaagggcgccagcgcccagagcttcatcgagagaatgacaaacttcgataagaacctgcccaacgagaaggtgctgcccaagcacagcctgctgtacgagtacttcaccgtgtacaacgagctgaccaaagtgaaatacgtgaccgagggaatgagaaagcccgccttcctgagcggcgagcagaaaaaggccatcgtggacctgctgttcaagaccaacagaaaagtgaccgtgaagcagctgaaagaggactacttcaagaaaatcgagtgcttcgactccgtggaaatctccggcgtggaagatagattcaacgcctccctgggcacataccacgatctgctgaaaattatcaaggacaaggacttcctggataacgaagagaacgaggacattctggaagatatcgtgctgaccctgacactgtttgaggaccgcgagatgatcgaggaaaggctgaaaacctacgctcacctgttcgacgacaaagtgatgaagcagctgaagagaaggcggtacaccggctggggcaggctgagcagaaagctgatcaacggcatcagagacaagcagagcggcaagacaatcctggatttcctgaagtccgacggcttcgccaaccggaacttcatgcagctgatccacgacgacagcctgacattcaaagaggacatccagaaagcccaggtgtccggccagggcgactctctgcacgagcatatcgctaacctggccggcagccccgctatcaagaagggcatcctgcagacagtgaaggtggtggacgagctcgtgaaagtgatgggcagacacaagcccgagaacatcgtgatcgagatggctagagagaaccagaccacccagaagggacagaagaactcccgcgagaggatgaagagaatcgaagagggcatcaaagagctgggcagccagatcctgaaagaacaccccgtggaaaacacccagctgcagaacgagaagctgtacctgtactacctgcagaatggccgggatatgtacgtggaccaggaactggacatcaacagactgtccgactacgatgtggaccatatcgtgcctcagagctttctgaaggacgactccatcgataacaaagtgctgactcggagcgacaagaacagaggcaagagcgacaacgtgccctccgaagaggtcgtgaagaagatgaagaactactggcgacagctgctgaacgccaagctgattacccagaggaagttcgataacctgaccaaggccgagagaggcggcctgagcgagctggataaggccggcttcatcaagaggcagctggtggaaaccagacagatcacaaagcacgtggcacagatcctggactcccggatgaacactaagtacgacgaaaacgataagctgatccgggaagtgaaagtgatcaccctgaagtccaagctggtgtccgatttccggaaggatttccagttttacaaagtgcgcgagatcaacaactaccaccacgcccacgacgcctacctgaacgccgtcgtgggaaccgccctgatcaaaaagtaccctaagctggaaagcgagttcgtgtacggcgactacaaggtgtacgacgtgcggaagatgatcgccaagagcgagcaggaaatcggcaaggctaccgccaagtacttcttctacagcaacatcatgaactttttcaagaccgaaatcaccctggccaacggcgagatcagaaagcgccctctgatcgagacaaacggcgaaaccggggagatcgtgtgggataagggcagagacttcgccacagtgcgaaaggtgctgagcatgccccaagtgaatatcgtgaaaaagaccgaggtgcagacaggcggcttcagcaaagagtctatcctgcccaagaggaacagcgacaagctgatcgccagaaagaaggactgggaccccaagaagtacggcggcttcgacagccctaccgtggcctactctgtgctggtggtggctaaggtggaaaagggcaagtccaagaaactgaagagtgtgaaagagctgctggggatcaccatcatggaaagaagcagctttgagaagaaccctatcgactttctggaagccaagggctacaaagaagtgaaaaaggacctgatcatcaagctgcctaagtactccctgttcgagctggaaaacggcagaaagagaatgctggcctctgccggcgaactgcagaagggaaacgagctggccctgcctagcaaatatgtgaacttcctgtacctggcctcccactatgagaagctgaagggcagccctgaggacaacgaacagaaacagctgtttgtggaacagcataagcactacctggacgagatcatcgagcagatcagcgagttctccaagagagtgatcctggccgacgccaatctggacaaggtgctgtctgcctacaacaagcacagggacaagcctatcagagagcaggccgagaatatcatccacctgttcaccctgacaaacctgggcgctcctgccgccttcaagtactttgacaccaccatcgaccggaagaggtacaccagcaccaaagaggtgctggacgccaccctgatccaccagagcatcaccggcctgtacgagacaagaatcgacctgtctcagctgggaggcgacaagagacctgccgccactaagaaggccggacaggccaaaaagaagaagtga

SEQ ID NO: 27 - protein, 1391 aa, synthetic construct
MDKPKKKRKVKYSIGLDIGTNSVGWAVITDEYKVPSKKFKVLGNTDRHSIKKNLIGALLFDSGETAEATRLKRTARRRYTRRKNRICYLQEIFSNEMAKVDDSFFHRLEESFLVEEDKKHERHPIFGNIVDEVAYHEKYPTIYHLRKKLVDSTDKADLRLIYLALAHMIKFRGHFLIEGDLNPDNSDVDKLFIQLVQTYNQLFEENPINASGVDAKAILSARLSKSRRLENLIAQLPGEKKNGLFGNLIALSLGLTPNFKSNFDLAEDAKLQLSKDTYDDDLDNLLAQIGDQYADLFLAAKNLSDAILLSDILRVNTEITKAPLSASMIKRYDEHHQDLTLLKALVRQQLPEKYKEIFFDQSKNGYAGYIDGGASQEEFYKFIKPILEKMDGTEELLVKLNREDLLRKQRTFDNGSIPHQIHLGELHAILRRQEDFYPFLKDNREKIEKILTFRIPYYVGPLARGNSRFAWMTRKSEETITPWNFEEVVDKGASAQSFIERMTNFDKNLPNEKVLPKHSLLYEYFTVYNELTKVKYVTEGMRKPAFLSGEQKKAIVDLLFKTNRKVTVKQLKEDYFKKIECFDSVEISGVEDRFNASLGTYHDLLKIIKDKDFLDNEENEDILEDIVLTLTLFEDREMIEERLKTYAHLFDDKVMKQLKRRRYTGWGRLSRKLINGIRDKQSGKTILDFLKSDGFANRNFMQLIHDDSLTFKEDIQKAQVSGQGDSLHEHIANLAGSPAIKKGILQTVKVVDELVKVMGRHKPENIVIEMARENQTTQKGQKNSRERMKRIEEGIKELGSQILKEHPVENTQLQNEKLYLYYLQNGRDMYVDQELDINRLSDYDVDHIVPQSFLKDDSIDNKVLTRSDKNRGKSDNVPSEEVVKKMKNYWRQLLNAKLITQRKFDNLTKAERGGLSELDKAGFIKRQLVETRQITKHVAQILDSRMNTKYDENDKLIREVKVITLKSKLVSDFRKDFQFYKVREINNYHHAHDAYLNAVVGTALIKKYPKLESEFVYGDYKVYDVRKMIAKSEQEIGKATAKYFFYSNIMNFFKTEITLANGEIRKRPLIETNGETGEIVWDKGRDFATVRKVLSMPQVNIVKKTEVQTGGFSKESILPKRNSDKLIARKKDWDPKKYGGFDSPTVAYSVLVVAKVEKGKSKKLKSVKELLGITIMERSSFEKNPIDFLEAKGYKEVKKDLIIKLPKYSLFELENGRKRMLASAGELQKGNELALPSKYVNFLYLASHYEKLKGSPEDNEQKQLFVEQHKHYLDEIIEQISEFSKRVILADANLDKVLSAYNKHRDKPIREQAENIIHLFTLTNLGAPAAFKYFDTTIDRKRYTSTKEVLDATLIHQSITGLYETRIDLSQLGGDKRPAATKKAGQAKKKK

SEQ ID NO: 28 - DNA, 4218 bp, synthetic construct
  source 1..4218: mol_type = other DNA
atggccccaaagaagaagcggaaggtcggtatccacggagtcccagcagccgacaagaagtacagcatcggcctggacatcggcaccaactctgtgggctgggccgtgatcaccgacgagtacaaggtgcccagcaagaaattcaaggtgctgggcaacaccgaccggcacagcatcaagaagaacctgatcggagccctgctgttcgacagcggcgaaacagccgaggccacccggctgaagagaaccgccagaagaagatacaccagacggaagaaccggatctgctatctgcaagagatcttcagcaacgagatggccaaggtggacgacagcttcttccacagactggaagagtccttcctggtggaagaggacaagaagcacgagagacaccccatcttcggcaacatcgtggacgaggtggcctaccacgagaagtaccccaccatctaccacctgagaaagaaactggtggacagcaccgacaaggccgacctgagactgatctacctggccctggcccacatgatcaagttcagaggccacttcctgatcgagggcgacctgaaccccgacaacagcgacgtggacaagctgttcatccagctggtgcagacctacaaccagctgttcgaggaaaaccccatcaacgccagcggcgtggacgccaaggctatcctgtctgccagactgagcaagagcagaaggctggaaaatctgatcgcccagctgcccggcgagaagaagaacggcctgttcggcaacctgattgccctgagcctgggcctgacccccaacttcaagagcaacttcgacctggccgaggatgccaaactgcagctgagcaaggacacctacgacgacgacctggacaacctgctggcccagatcggcgaccagtacgccgacctgttcctggccgccaagaacctgtctgacgccatcctgctgagcgacatcctgagagtgaacaccgagatcaccaaggcccccctgagcgcctctatgatcaagagatacgacgagcaccaccaggacctgaccctgctgaaagctctcgtgcggcagcagctgcctgagaagtacaaagaaatcttcttcgaccagagcaagaacggctacgccggctacatcgatggcggcgctagccaggaagagttctacaagttcatcaagcccatcctggaaaagatggacggcaccgaggaactgctcgtgaagctgaacagagaggacctgctgagaaagcagagaaccttcgacaacggcagcatcccccaccagatccacctgggagagctgcacgctatcctgagaaggcaggaagatttttacccattcctgaaggacaaccgggaaaagatcgagaagatcctgaccttcaggatcccctactacgtgggccccctggccagaggcaacagcagattcgcctggatgaccagaaagagcgaggaaaccatcaccccctggaacttcgaggaagtggtggacaagggcgccagcgcccagagcttcatcgagagaatgacaaacttcgataagaacctgcccaacgagaaggtgctgcccaagcacagcctgctgtacgagtacttcaccgtgtacaacgagctgaccaaagtgaaatacgtgaccgagggaatgagaaagcccgccttcctgagcggcgagcagaaaaaggccatcgtggacctgctgttcaagaccaacagaaaagtgaccgtgaagcagctgaaagaggactacttcaagaaaatcgagtgcttcgactccgtggaaatctccggcgtggaagatagattcaacgcctccctgggcacataccacgatctgctgaaaattatcaaggacaaggacttcctggataacgaagagaacgaggacattctggaagatatcgtgctgaccctgacactgtttgaggaccgcgagatgatcgaggaaaggctgaaaacctacgctcacctgttcgacgacaaagtgatgaagcagctgaagagaaggcggtacaccggctggggcaggctgagcagaaagctgatcaacggcatcagagacaagcagagcggcaagacaatcctggatttcctgaagtccgacggcttcgccaaccggaacttcatgcagctgatccacgacgacagcctgacattcaaagaggacatccagaaagcccaggtgtccggccagggcgactctctgcacgagcatatcgctaacctggccggcagccccgctatcaagaagggcatcctgcagacagtgaaggtggtggacgagctcgtgaaagtgatgggcagacacaagcccgagaacatcgtgatcgagatggctagagagaaccagaccacccagaagggacagaagaactcccgcgagaggatgaagagaatcgaagagggcatcaaagagctgggcagccagatcctgaaagaacaccccgtggaaaacacccagctgcagaacgagaagctgtacctgtactacctgcagaatggccgggatatgtacgtggaccaggaactggacatcaacagactgtccgactacgatgtggaccatatcgtgcctcagagctttctgaaggacgactccatcgataacaaagtgctgactcggagcgacaagaacagaggcaagagcgacaacgtgccctccgaagaggtcgtgaagaagatgaagaactactggcgacagctgctgaacgccaagctgattacccagaggaagttcgataacctgaccaaggccgagagaggcggcctgagcgagctggataaggccggcttcatcaagaggcagctggtggaaaccagacagatcacaaagcacgtggcacagatcctggactcccggatgaacactaagtacgacgaaaacgataagctgatccgggaagtgaaagtgatcaccctgaagtccaagctggtgtccgatttccggaaggatttccagttttacaaagtgcgcgagatcaacaactaccaccacgcccacgacgcctacctgaacgccgtcgtgggaaccgccctgatcaaaaagtaccctaagctggaaagcgagttcgtgtacggcgactacaaggtgtacgacgtgcggaagatgatcgccaagagcgagcaggaaatcggcaaggctaccgccaagtacttcttctacagcaacatcatgaactttttcaagaccgaaatcaccctggccaacggcgagatcagaaagcgccctctgatcgagacaaacggcgaaaccggggagatcgtgtgggataagggcagagacttcgccacagtgcgaaaggtgctgagcatgccccaagtgaatatcgtgaaaaagaccgaggtgcagacaggcggcttcagcaaagagtctatcctgcccaagaggaacagcgacaagctgatcgccagaaagaaggactgggaccccaagaagtacggcggcttcgacagccctaccgtggcctactctgtgctggtggtggctaaggtggaaaagggcaagtccaagaaactgaagagtgtgaaagagctgctggggatcaccatcatggaaagaagcagctttgagaagaaccctatcgactttctggaagccaagggctacaaagaagtgaaaaaggacctgatcatcaagctgcctaagtactccctgttcgagctggaaaacggcagaaagagaatgctggcctctgccggcgaactgcagaagggaaacgagctggccctgcctagcaaatatgtgaacttcctgtacctggcctcccactatgagaagctgaagggcagccctgaggacaacgaacagaaacagctgtttgtggaacagcataagcactacctggacgagatcatcgagcagatcagcgagttctccaagagagtgatcctggccgacgccaatctggacaaggtgctgtctgcctacaacaagcacagggacaagcctatcagagagcaggccgagaatatcatccacctgttcaccctgacaaacctgggcgctcctgccgccttcaagtactttgacaccaccatcgaccggaagaggtacaccagcaccaaagaggtgctggacgccaccctgatccaccagagcatcaccggcctgtacgagacaagaatcgacctgtctcagctgggaggcgacaagagacctgccgccactaagaaggccggacaggccaaaaagaagaagtgagcggccgcttaatta

SEQ ID NO: 29 - RNA, 16 nt, synthetic construct
  source 1..16: mol_type = other RNA
gttttagagctatgct

SEQ ID NO: 30 - RNA, 67 nt, synthetic construct
  source 1..67: mol_type = other RNA
agcatagcaagttaaaataaggctagtccgttatcaacttgaaaaagtggcaccgagtcggtgcttt

SEQ ID NO: 31 - RNA, 72 nt, synthetic construct
  source 1..72: mol_type = other RNA
aaacagcatagcaagttaaaataaggctagtccgttatcaacttgaaaaagtggcaccgagtcggtgctttt

SEQ ID NO: 32 - RNA, 82 nt, synthetic construct
  source 1..82: mol_type = other RNA
gttggaaccattcaaaacagcatagcaagttaaaataaggctagtccgttatcaacttgaaaaagtggcaccgagtcggtgc

SEQ ID NO: 33 - RNA, 77 nt, synthetic construct
  source 1..77: mol_type = other RNA
gttttagagctagaaatagcaagttaaaataaggctagtccgttatcaacttgaaaaagtggcaccgagtcggtgct

SEQ ID NO: 34 - RNA, 82 nt, synthetic construct; identical to SEQ ID NO: 32
  source 1..82: mol_type = other RNA

SEQ ID NO: 35 - RNA, 76 nt, synthetic construct
  source 1..76: mol_type = other RNA
gttttagagctagaaatagcaagttaaaataaggctagtccgttatcaacttgaaaaagtggcaccgagtcggtgc

SEQ ID NO: 36 - RNA, 86 nt, synthetic construct
  source 1..86: mol_type = other RNA
gtttaagagctatgctggaaacagcatagcaagtttaaataaggctagtccgttatcaacttgaaaaagtggcaccgagtcggtgc

SEQ ID NO: 37 - RNA, 83 nt, synthetic construct
  source 1..83: mol_type = other RNA
gttttagagctagaaatagcaagttaaaataaggctagtccgttatcaacttgaaaaagtggcaccgagtcggtgcttttttt

SEQ ID NO: 38 - RNA, 80 nt, synthetic construct
  source 1..80: mol_type = other RNA
gttttagagctagaaatagcaagttaaaataaggctagtccgttatcaacttgaaaaagtggcaccgagtcggtgctttt

SEQ ID NO: 39 - RNA, 92 nt, synthetic construct
  source 1..92: mol_type = other RNA
gtttaagagctatgctggaaacagcatagcaagtttaaataaggctagtccgttatcaacttgaaaaagtggcaccgagtcggtgctttttt

SEQ ID NO: 40-42 - skipped (3 entries)

SEQ ID NO: 43 - RNA, 103 nt, synthetic construct
  source 1..103: mol_type = other RNA
gagcacggaacgacctgagtgttttagagctagaaatagcaagttaaaataaggctagtccgttatcaacttgaaaaagtggcaccgagtcggtgcttttttt

SEQ ID NO: 44 - RNA, 100 nt, synthetic construct
  misc_difference 1..20: note = n is a, c, g, or u
  source 1..100: mol_type = other RNA
nnnnnnnnnnnnnnnnnnnngttttagagctagaaatagcaagttaaaataaggctagtccgttatcaacttgaaaaagtggcaccgagtcggtgctttt

SEQ ID NO: 45 - DNA, 3519 bp, synthetic construct
  misc_feature 1..141: note = ITR
  misc_feature 156..178: note = Guide RNA Target Sequence Plus PAM
  misc_feature 179..274: note = Splice Acceptor
  misc_feature 275..897: note = Human RS1
  misc_feature 898..2991: note = Human RS1 PolyA Region
  misc_feature 2992..3240: note = U6
  misc_feature 3241..3260: note = Guide Sequence
  misc_feature 3261..3343: note = Guide RNA Scaffold
  misc_feature 3344..3366: note = Guide RNA Target Sequence Plus PAM
  misc_feature 3379..3519: note = ITR
  source 1..3519: mol_type = other DNA
cctgcaggcagctgcgcgctcgctcgctcactgaggccgcccgggcaaagcccgggcgtcgggcgacctttggtcgcccggcctcagtgagcgagcgagcgcgcagagagggagtggccaactccatcactaggggttcctgcgctagctgtacacctactcaggtcgttccgtgctcgttgaccagctcggcggtgacctgcacgtctagggcgcagtagtccagggtttccttgatgatgtcatacttatcctgtcccttttttttccacagccacattgggattatcgtctaccgaggatgaaggcgaggacccctggtaccaaaaagcatgcaagtgcgattgccaaggaggacccaatgctctgtggtctgcaggtgccacctccttggactgtataccagaatgcccatatcacaagcctctgggtttcgagtcaggggaggtcacaccggaccagatcacctgctctaacccggagcagtatgtgggctggtattcttcgtggactgcaaacaaggcccggctcaacagtcaaggctttgggtgtgcctggctctccaagttccaggacagtagccagtggttacagatagatctgaaggagatcaaagtgatttcagggatcctcacccaggggcgctgtgacatcgatgagtggatgaccaagtacagcgtgcagtacaggaccgatgagcgcctgaactggatttactacaaggaccagactggaaacaaccgggtcttctatggcaactcggaccgcacctccacggttcagaacctgctgcggccccccatcatctcccgcttcatccgcctcatcccgctgggctggcacgtccgcattgccatccggatggagctgctggagtgcgtcagcaagtgtgcctgatgcctgcctcagctcggcgcctgccagggggtgactggcacagagcgggccgtaggggaccccctcacacaccaccgagatggacagggctatatttcgcaaagcaattgtaactgcagtgctgggtagataatttttttttttttaagatatagctttctgatttcaatgaaataaaaatgaacttattccccactcagggccagagaaagtcagaacaaagaaaatgtccccgaaacgaattttcttacaaaagcctaagtagcaggggtaattttctgctcattttttgtctcagtgatactgtgaaaggtgcagtctcaggggaacacaaagcagccctgataatttgaaaattcatttgctttaccacattcaagacagaaacatacagtttcctaaagcctggctttgaatgcagaagggagcagctcctcctagttaagtttccactaaatcatcgccaaagaggacttcagagccctggggaggcagctgagggtctcaagggtgactgggtggcagggatgagtgcggtgggtgagaatcccggtgccctgagaggctatacgtgacaaatgaccaaaagcccaaggtaggggagtttcctctgctcacagttcttaccttcaaggcggatctgggcttccaccctcatgaacacagggattggggagggaccagagcgcccaatacacacagctccattatgcaatccattccagcaaattccccgtgtctgtggtcaccatttaggtgatcatacaggacaggctgcacatctcagtatatgtagggaccccaaatgaccacaacacagtacaattgccctttacctagggctaccatttcctagcaaaccaaacatagttcgagaacagctggcccaggagctaccactggctactcagaggaggctcattagctggctacatgcttcgcaggaagtgggaaggactcacatcataaaaaggaccatgtagctttttccctgaaagcttctcaccctccaccctctgccttgcaatacgcaaactgcgcctgctcctgaaaagctctctgggaaggaatgggcctggctttccgttcctggaggcggcgccttagattgggaggcctcattggccacttagagcgcagcctgagtttccaggccccttcctgggagaggctgttaacacgggggaggggcaggagagggatatggagagcaggtggtggaatcagaggacgaggctgctctaaagactgttctggccccagacacagggtagtctttgctagcagctcatttccgagttacttttcattttcaaatgccaaggcaagtgactagactcgcgctaatacagtgctggacaacacattcaccttttctgtgaacaggcagccttctaaaagccccaaacatccttcttgatgctttgggggctcaattattttatatccaacccagcatctttctagtccctatgctgtatgcttgaacttcggaaaatgcttttccccgcccaatcttctctcaaatataaacacatcacacagggtgttgggggtggggggggggggtggggggacttatccctggccttaggacacaggacaaatctattttggatagaaatgcctgaacagagacccttatttggaaaggtgaattaactttggtcacgacatggactgtcagacaaaatggcagtatcctaagagttaaggcacatcaaacacaggagtcgagagagtgcagttcagggaaaaaggagaggaggaaacagtgaggcagggagaaaggctttccaaataagagttcatgttggaaacttttgtcacggctttattgagattaagttcacatacaatttgtatccatttaaagtatacaatttgatgacttttggtatattcagagttgtgcaaccattatcactagatcaattttagaaagtttatcaccccaaagagaaatcctgcacccatcagccaacactccccaacccatcggccaccccaagccctctgcaaccacgaatcgactgtctctgtagattggccttctggacgttctacataaatgaaatcatatagtatgtggtagagggcctatttcccatgattccttcatatttgcatatacgatacaaggctgttagagagataattggaattaatttgactgtaaacacaaagatattagtacaaaatacgtgacgtagaaagtaataatttcttgggtagtttgcagttttaaaattatgttttaaaatggactatcatatgcttaccgtaacttgaaagtatttcgatttcttggctttatatatcttgtggaaaggacgaaacaccgagcacggaacgacctgagtgttttagagctagaaatagcaagttaaaataaggctagtccgttatcaacttgaaaaagtggcaccgagtcggtgctttttttcctactcaggtcgttccgtgctctctagaggccgcaggaacccctagtgatggagttggccactccctctctgcgcgctcgctcgctcactgaggccgggcgaccaaaggtcgcccgacgcccgggctttgcccgggcggcctcagtgagcgagcgagcgcgcagctgcctgcagg

SEQ ID NO: 46 - DNA, 2455 bp, synthetic construct
  misc_feature 1..161: note = ITR
  misc_feature 168..227: note = Splice Acceptor
  misc_feature 228..850: note = Human RS1
  misc_feature 851..1076: note = bGH polyA
  misc_feature 1077..1325: note = U6
  misc_feature 1326..1345: note = Guide Sequence
  misc_feature 1346..1428: note = Guide RNA Scaffold
  misc_feature 1429..1650: note = Reverse Complement of SV40 polyA
  misc_feature 1651..2273: note = Reverse Complement of Codon-Optimized hRS1
  misc_feature 2274..2336: note = Reverse Complement of Splice Acceptor
  misc_feature 2344..2455: note = ITR
  source 1..2455: mol_type = other DNA
ggccactccctctctgcgcgctcgctcgctcactgaggccgggcgaccaaaggtcgcccgacgcccgggctttgcccgggcggcctcagtgagcgagcgagcgcgcagagagggagtggccaactccatcactaggggttcctggaggggtggagtcgtgacctagggatgctgttggatttctctttcattaattagattttttctgtctcatccttttgctttagccacattgggattatcgtctaccgaggatgaaggcgaggacccctggtaccaaaaagcatgcaagtgcgattgccaaggaggacccaatgctctgtggtctgcaggtgccacctccttggactgtataccagaatgcccatatcacaagcctctgggtttcgagtcaggggaggtcacaccggaccagatcacctgctctaacccggagcagtatgtgggctggtattcttcgtggactgcaaacaaggcccggctcaacagtcaaggctttgggtgtgcctggctctccaagttccaggacagtagccagtggttacagatagatctgaaggagatcaaagtgatttcagggatcctcacccaggggcgctgtgacatcgatgagtggatgaccaagtacagcgtgcagtacaggaccgatgagcgcctgaactggatttactacaaggaccagactggaaacaaccgggtcttctatggcaactcggaccgcacctccacggttcagaacctgctgcggccccccatcatctcccgcttcatccgcctcatcccgctgggctggcacgtccgcattgccatccggatggagctgctggagtgcgtcagcaagtgtgcctgactgtgccttctagttgccagccatctgttgtttgcccctcccccgtgccttccttgaccctggaaggtgccactcccactgtcctttcctaataaaatgaggaaattgcatcgcattgtctgagtaggtgtcattctattctggggggtggggtggggcaggacagcaagggggaggattgggaagacaatagcaggcatgctggggatgcggtgggctctatggcgagggcctatttcccatgattccttcatatttgcatatacgatacaaggctgttagagagataattggaattaatttgactgtaaacacaaagatattagtacaaaatacgtgacgtagaaagtaataatttcttgggtagtttgcagttttaaaattatgttttaaaatggactatcatatgcttaccgtaacttgaaagtatttcgatttcttggctttatatatcttgtggaaaggacgaaacaccgagcacggaacgacctgagtgttttagagctagaaatagcaagttaaaataaggctagtccgttatcaacttgaaaaagtggcaccgagtcggtgcttttttttaccacatttgtagaggttttacttgctttaaaaaacctcccacacctccccctgaacctgaaacataaaatgaatgcaattgttgttgttaacttgtttattgcagcttataatggttacaaataaagcaatagcatcacaaatttcacaaataaagcatttttttcactgcattctagttgtggtttgtccaaactcatcaatgtatcttatcatgtctgtcaggcgcacttggacacgcattccagcagttccattctgatggcgatccgcacgtgccagccgagagggatcagtctgatgaatctggagatgataggaggcctcagcagattctgcacggtgctggttctgtcgctgttgccgtagaacactctgttgttgccggtctggtccttgtagtagatccagttcagtctctcgtcggttctgtactgcacgctgtacttggtcatccactcgtcgatgtcgcatctgccctgtgtcaggatgccgctgatgactttgatctctttcaggtcgatctgcagccactggctagagtcctggaacttgctcagccaggcacagccgaagccttggctgttcagtctggccttgttggctgtccagctagagtaccagccgacgtactgctcggggttgctacaggtgatctggtcaggggtcacttcgccgctctcgaagcccagaggcttatggtaggggcactcagggatgcagtccaggcttgtagcgccagcgctccaaagagcattagggccgccttgacagtcgcacttgcaggctttctgataccaggggtcctcgccttcatcttctgtgctgctcaggcccagtgtggctgagcaaaagaacaagagagggaaaaaatgaaattaagaaaggaaagaaggcaaaatgaaaagctagtccactccctctctgcgcgctcgctcgctcactgaggccgggcgaccaaaggtcgcccgacgcccgggctttgcccgggcggcctcagtgagcgagcgagcgcgcagagaggga

SEQ ID NO: 47 - DNA, 2763 bp, synthetic construct
  misc_feature 1..141: note = ITR
  misc_feature 156..379: note = Splice Acceptor
  misc_feature 380..1002: note = Human RS1
  misc_feature 1003..1228: note = bGH polyA
  misc_feature 1229..1477: note = U6
  misc_feature 1478..1497: note = Guide Sequence
  misc_feature 1498..1574: note = Guide RNA Scaffold
  misc_feature 1575..1802: note = Reverse Complement of SV40 polyA
  misc_feature 1803..2425: note = Reverse Complement of Codon-Optimized Human RS1
  misc_feature 2426..2608: note = Splice Acceptor
  misc_feature 2609..2763: note = ITR
  source 1..2763: mol_type = other DNA
cctgcaggcagctgcgcgctcgctcgctcactgaggccgcccgggcaaagcccgggcgtcgggcgacctttggtcgcccggcctcagtgagcgagcgagcgcgcagagagggagtggccaactccatcactaggggttcctgcgctagctgtacactataatgatgatcttgttctttctgtttaattttactgtccctagcttcttagcatctgcggatgtttttcctggcagatatttactcaccatgacttcttccagaaggggtgttggtagctttcatgtgactatttctatttcacttttccatgtaacgagtgatgctgttggatttctctttcattaattagattttttctgtctcatccttttgctttagccacattgggattatcgtctaccgaggatgaaggcgaggacccctggtaccaaaaagcatgcaagtgcgattgccaaggaggacccaatgctctgtggtctgcaggtgccacctccttggactgtataccagaatgcccatatcacaagcctctgggtttcgagtcaggggaggtcacaccggaccagatcacctgctctaacccggagcagtatgtgggctggtattcttcgtggactgcaaacaaggcccggctcaacagtcaaggctttgggtgtgcctggctctccaagttccaggacagtagccagtggttacagatagatctgaaggagatcaaagtgatttcagggatcctcacccaggggcgctgtgacatcgatgagtggatgaccaagtacagcgtgcagtacaggaccgatgagcgcctgaactggatttactacaaggaccagactggaaacaaccgggtcttctatggcaactcggaccgcacctccacggttcagaacctgctgcggccccccatcatctcccgcttcatccgcctcatcccgctgggctggcacgtccgcattgccatccggatggagctgctggagtgcgtcagcaagtgtgcctgactgtgccttctagttgccagccatctgttgtttgcccctcccccgtgccttccttgaccctggaaggtgccactcccactgtcctttcctaataaaatgaggaaattgcatcgcattgtctgagtaggtgtcattctattctggggggtggggtggggcaggacagcaagggggaggattgggaagacaatagcaggcatgctggggatgcggtgggctctatggcgagggcctatttcccatgattccttcatatttgcatatacgatacaaggctgttagagagataattggaattaatttgactgtaaacacaaagatattagtacaaaatacgtgacgtagaaagtaataatttcttgggtagtttgcagttttaaaattatgttttaaaatggactatcatatgcttaccgtaacttgaaagtatttcgatttcttggctttatatatcttgtggaaaggacgaaacaccgagcacggaacgacctgagtgttttagagctagaaatagcaagttaaaataaggctagtccgttatcaacttgaaaaagtggcaccgagtcggtgcttttttttaccacatttgtagaggttttacttgctttaaaaaacctcccacacctccccctgaacctgaaacataaaatgaatgcaattgttgttgttaacttgtttattgcagcttataatggttacaaataaagcaatagcatcacaaatttcacaaataaagcatttttttcactgcattctagttgtggtttgtccaaactcatcaatgtatcttatcatgtctgtcaggcgcacttggacacgcattccagcagttccattctgatggcgatccgcacgtgccagccgagagggatcagtctgatgaatctggagatgataggaggcctcagcagattctgcacggtgctggttctgtcgctgttgccgtagaacactctgttgttgccggtctggtccttgtagtagatccagttcagtctctcgtcggttctgtactgcacgctgtacttggtcatccactcgtcgatgtcgcatctgccctgtgtcaggatgccgctgatgactttgatctctttcaggtcgatctgcagccactggctagagtcctggaacttgctcagccaggcacagccgaagccttggctgttcagtctggccttgttggctgtccagctagagtaccagccgacgtactgctcggggttgctacaggtgatctggtcaggggtcacttcgccgctctcgaagcccagaggcttatggtaggggcactcagggatgcagtccaggcttgtagcgccagcgctccaaagagcattagggccgccttgacagtcgcacttgcaggctttctgataccaggggtcctcgccttcatcttctgtgctgctcaggcccagtgtggctgagcaaaagaacaagagagggaaaaaatgaaattaagaaaggaaagaaggcaaaatgaaaacaatgccatagagattaaggagctcattctggagggaggaaaaggatggcaatgactgttgttttttcttatagaattatggaaaatatattaatatagcaaagcagggtgcagtacagccctctagaggccgcaggaacccctagtgatggagttggccactccctctctgcgcgctcgctcgctcactgaggccgggcgaccaaaggtcgcccgacgcccgggctttgcccgggcggcctcagtgagcgagcgagcgcgcagctgcctgcagg

SEQ ID NO: 48 - protein, 224 aa, Mus musculus
MPHKIEGFFLLLLFGYEATLGLSSTEDEGEDPWYQKACKCDCQVGANALWSAGATSLDCIPECPYHKPLGFESGEVTPDQITCSNPEQYVGWYSSWTANKARLNSQGFGCAWLSKYQDSSQWLQIDLKEIKVISGILTQGCCDIDEWVTKYSVQYRTDERLNWIYYKDQTGNNRVFYGNSDRSSTVQNLLRPPIISRFIRLIPLGWHVRIAIRMELLECASKCA

SEQ ID NO: 49 - protein, 7 aa, synthetic construct
PKKKRKV

SEQ ID NO: 50 - protein, 7 aa, synthetic construct
PKKKRRV

SEQ ID NO: 51 - protein, 16 aa, synthetic construct
KRPAATKKAGQAKKKK

SEQ ID NO: 52 - RNA, 22 nt, synthetic construct
  source 1..22: mol_type = other RNA
gttttagagctatgctgttttg

SEQ ID NO: 53 - RNA, 68 nt, synthetic construct
  source 1..68: mol_type = other RNA
gttttagagctagaaatagcaagttaaaataaggctagtccgttatcaacttggcaccgagtcggtgc

SEQ ID NO: 54 - DNA, 20 bp, synthetic construct
  source 1..20: mol_type = other DNA
gggccttatgcatctccatc

SEQ ID NO: 55 - DNA, 20 bp, synthetic construct
  source 1..20: mol_type = other DNA
taatcagcatattatccaga

SEQ ID NO: 56 - DNA, 20 bp, synthetic construct
  source 1..20: mol_type = other DNA
cccttttgtacgttttttaa

SEQ ID NO: 57 - DNA, 20 bp, synthetic construct
  source 1..20: mol_type = other DNA
ctgtatcttcttagccagta

SEQ ID NO: 58 - DNA, 20 bp, synthetic construct
  source 1..20: mol_type = other DNA
gttaacgcgtcatttacatt

SEQ ID NO: 59 - DNA, 20 bp, synthetic construct
  source 1..20: mol_type = other DNA
tacaataaattagccggatg

SEQ ID NO: 60 - DNA, 20 bp, synthetic construct
  source 1..20: mol_type = other DNA
aaacttttaggagtcaaagt

SEQ ID NO: 61 - DNA, 20 bp, synthetic construct
  source 1..20: mol_type = other DNA
aaaacttttaggagtcaaag

SEQ ID NO: 62 - DNA, 20 bp, synthetic construct
  source 1..20: mol_type = other DNA
aatgttaacagtgttggctt

SEQ ID NO: 63 - DNA, 20 bp, synthetic construct
  source 1..20: mol_type = other DNA
gtggtggctgcaggtgaggg

SEQ ID NO: 64 - DNA, 20 bp, synthetic construct
  source 1..20: mol_type = other DNA
tactaaaatgttaacagtgt

SEQ ID NO: 65 - DNA, 20 bp, synthetic construct
  source 1..20: mol_type = other DNA
aaaaaaggacttgacatgca

SEQ ID NO: 66 - DNA, 20 bp, synthetic construct
  source 1..20: mol_type = other DNA
gtcccagcttctcttgaggg

SEQ ID NO: 67 - DNA, 20 bp, synthetic construct
  source 1..20: mol_type = other DNA
gttaacagtgttggctttgg

SEQ ID NO: 68 - DNA, 20 bp, synthetic construct
  source 1..20: mol_type = other DNA
gttggtggtcactgacagtg

SEQ ID NO: 69 - DNA, 20 bp, synthetic construct
  source 1..20: mol_type = other DNA
gaaactagtggctaccgtac

SEQ ID NO: 70 - DNA, 20 bp, synthetic construct
  source 1..20: mol_type = other DNA
aaaaaacgtacaaaaggggc

SEQ ID NO: 71 - DNA, 20 bp, synthetic construct
  source 1..20: mol_type = other DNA
agccccaggccatcaaccgg

SEQ ID NO: 72 - DNA, 20 bp, synthetic construct
  source 1..20: mol_type = other DNA
ggcagccagacagatgcttc

SEQ ID NO: 73 - DNA, 20 bp, synthetic construct
  source 1..20: mol_type = other DNA
ctggagaacaaaagcatttt

SEQ ID NO: 74 - DNA, 20 bp, synthetic construct
  source 1..20: mol_type = other DNA
atcttagatttatgcaatgt

SEQ ID NO: 75 - DNA, 20 bp, synthetic construct
  source 1..20: mol_type = other DNA
acaagtagaatcagaattct

SEQ ID NO: 76 - DNA, 20 bp, synthetic construct
  source 1..20: mol_type = other DNA
aatatcggctcactgcaacc

SEQ ID NO: 77 - DNA, 20 bp, synthetic construct
  source 1..20: mol_type = other DNA
ccctcaagagaagctgggac

SEQ ID NO: 78 - DNA, 20 bp, synthetic construct
  source 1..20: mol_type = other DNA
tcttaggagatgacgaggtt

SEQ ID NO: 79 - DNA, 20 bp, synthetic construct
  source 1..20: mol_type = other DNA
aataataaagaactagagaa

SEQ ID NO: 80 - DNA, 20 bp, synthetic construct
  source 1..20: mol_type = other DNA
aaaaacgtacaaaaggggcc

SEQ ID NO: 81 - DNA, 20 bp, synthetic construct
  source 1..20: mol_type = other DNA
ggctgagcaggcggagaagt

SEQ ID NO: 82 - DNA, 20 bp, synthetic construct
  source 1..20: mol_type = other DNA
agagaaaggagaacagtctg

SEQ ID NO: 83 - DNA, 20 bp, synthetic construct
  source 1..20: mol_type = other DNA
cttctttctctttcacgaga

SEQ ID NO: 84 - DNA, 20 bp, synthetic construct
  source 1..20: mol_type = other DNA
aatcttagatttatgcaatg

SEQ ID NO: 85 - DNA, 20 bp, synthetic construct
  source 1..20: mol_type = other DNA
ctgagcaggcggagaagtag

SEQ ID NO: 86 - DNA, 20 bp, synthetic construct
  source 1..20: mol_type = other DNA
acctagtgttgacaaggctg

SEQ ID NO: 87 - DNA, 20 bp, synthetic construct
  source 1..20: mol_type = other DNA
tcccagcttctcttgagggt

SEQ ID NO: 88 - DNA, 20 bp, synthetic construct
  source 1..20: mol_type = other DNA
aataattctgttgggacgac

SEQ ID NO: 89 - DNA, 20 bp, synthetic construct
  source 1..20: mol_type = other DNA
cctataaagaggacgtttcc

SEQ ID NO: 90 - DNA, 20 bp, synthetic construct
  source 1..20: mol_type = other DNA
ccttctttctctttcacgag

SEQ ID NO: 91 - DNA, 20 bp, synthetic construct
  source 1..20: mol_type = other DNA
cccatcgaagtactcaccat

SEQ ID NO: 92 - DNA, 20 bp, synthetic construct
  source 1..20: mol_type = other DNA
gtgtcatatgttgctggtgg

SEQ ID NO: 93 - DNA, 20 bp, synthetic construct
  source 1..20: mol_type = other DNA
aatgtaaatgacgcgttaac

SEQ ID NO: 94 - DNA, 20 bp, synthetic construct
  source 1..20: mol_type = other DNA
gcctttgagccaagtggatt

SEQ ID NO: 95 - DNA, 20 bp, synthetic construct
  source 1..20: mol_type = other DNA
gtcagactctgtgctggctg

SEQ ID NO: 96 - DNA, 20 bp, synthetic construct
  source 1..20: mol_type = other DNA
ccgtcaatagcattccggtt

SEQ ID NO: 97 - DNA, 20 bp, synthetic construct
  source 1..20: mol_type = other DNA
ccattaaaaaacgtacaaaa

SEQ ID NO: 98 - DNA, 20 bp, synthetic construct
  source 1..20: mol_type = other DNA
gggatttggggaggatgggg

SEQ ID NO: 99 - DNA, 20 bp, synthetic construct
  source 1..20: mol_type = other DNA
actgtgtcatatgttgctgg

SEQ ID NO: 100 - DNA, 20 bp, synthetic construct
  source 1..20: mol_type = other DNA
tacaatgttgtggaccgggc

SEQ ID NO: 101 - DNA, 20 bp, synthetic construct
  source 1..20: mol_type = other DNA
gatagagtagcaaacaaaac

SEQ ID NO: 102 - DNA, 20 bp, synthetic construct
  source 1..20: mol_type = other DNA
gctctcaaaggagactgaga

SEQ ID NO: 103 - DNA, 20 bp, synthetic construct
  source 1..20: mol_type = other DNA
ggaagagcaaggagctcctg

SEQ ID NO: 104 - DNA, 20 bp, synthetic construct
  source 1..20: mol_type = other DNA
tgtgtcatatgttgctggtg

SEQ ID NO: 105 - DNA, 20 bp, synthetic construct
  source 1..20: mol_type = other DNA
ctgagaaggtgtacctagag

SEQ ID NO: 106 - DNA, 20 bp, synthetic construct
  source 1..20: mol_type = other DNA
gtccgggagccagttcctgc

SEQ ID NO: 107 - DNA, 20 bp, synthetic construct
  source 1..20: mol_type = other DNA
ttaggagatgacgaggttgg

SEQ ID NO: 108 - DNA, 20 bp, synthetic construct
  source 1..20: mol_type = other DNA
ggaggaagcagagctctcaa

SEQ ID NO: 109 - DNA, 20 bp, synthetic construct
  source 1..20: mol_type = other DNA
agtcatcagcctgggaaaca

SEQ ID NO: 110 - DNA, 20 bp, synthetic construct
  source 1..20: mol_type = other DNA
tccgggagccagttcctgca

SEQ ID NO: 111 - DNA, 20 bp, synthetic construct
  source 1..20: mol_type = other DNA
gagcaaggagctcctgaggc

SEQ ID NO: 112 - DNA, 20 bp, synthetic construct
  source 1..20: mol_type = other DNA
tctggtacaatgttgtggac

SEQ ID NO: 113 - DNA, 20 bp, synthetic construct
  source 1..20: mol_type = other DNA
cctgggagtgtctgacaacc

SEQ ID NO: 114 - DNA, 20 bp, synthetic construct
  source 1..20: mol_type = other DNA
ccagttcctgcagggcctcg

SEQ ID NO: 115 - DNA, 20 bp, synthetic construct
  source 1..20: mol_type = other DNA
tagggaatgggctgagcagg

SEQ ID NO: 116 - DNA, 20 bp, synthetic construct
  source 1..20: mol_type = other DNA
agctttctgtccctgtgaga

SEQ ID NO: 117 - DNA, 20 bp, synthetic construct
  source 1..20: mol_type = other DNA
tcgtctccctgccttctcac

SEQ ID NO: 118 - DNA, 20 bp, synthetic construct
  source 1..20: mol_type = other DNA
cgaagtactcaccatgggca

SEQ ID NO: 119 - DNA, 20 bp, synthetic construct
  source 1..20: mol_type = other DNA
aggccactggaccatgccca

SEQ ID NO: 120 - DNA, 20 bp, synthetic construct
  source 1..20: mol_type = other DNA
ggcagggagacgagtctaat

SEQ ID NO: 121 - DNA, 20 bp, synthetic construct
  source 1..20: mol_type = other DNA
gggcttagatttatgcaata

SEQ ID NO: 122 - DNA, 20 bp, synthetic construct
  source 1..20: mol_type = other DNA
ttcagcgaagacaagggatt

SEQ ID NO: 123 - DNA, 20 bp, synthetic construct
  source 1..20: mol_type = other DNA
catggcccacgaggccctgc

SEQ ID NO: 124 - DNA, 20 bp, synthetic construct
  source 1..20: mol_type = other DNA
cagttcctgcagggcctcgt

SEQ ID NO: 125 - DNA, 20 bp, synthetic construct
  source 1..20: mol_type = other DNA
cattaaaaaacgtacaaaag

SEQ ID NO: 126 - DNA, 20 bp, synthetic construct
  source 1..20: mol_type = other DNA
aggcagggagacgagtctaa

SEQ ID NO: 127 - DNA, 20 bp, synthetic construct
  source 1..20: mol_type = other DNA
ctaacatctggatgaacctg

SEQ ID NO: 128 - DNA, 20 bp, synthetic construct
  source 1..20: mol_type = other DNA
ccagtggcctgtcttctcct

SEQ ID NO: 129 - DNA, 20 bp, synthetic construct
  source 1..20: mol_type = other DNA
tattacaaatactgccgcta

SEQ ID NO: 130 - DNA, 20 bp, synthetic construct
  source 1..20: mol_type = other DNA
gcagggagacgagtctaatg

SEQ ID NO: 131 - DNA, 20 bp, synthetic construct
  source 1..20: mol_type = other DNA
caatctgcttgagaaacagg

SEQ ID NO: 132 - DNA, 20 bp, synthetic construct
  source 1..20: mol_type = other DNA
ggcttagatttatgcaatat

SEQ ID NO: 133 - DNA, 20 bp, synthetic construct
  source 1..20: mol_type = other DNA
acactcccagggctcactct

SEQ ID NO: 134 - DNA, 20 bp, synthetic construct
  source 1..20: mol_type = other DNA
tatgggctcattctgcccct

SEQ ID NO: 135 - DNA, 20 bp, synthetic construct
  source 1..20: mol_type = other DNA
cgaagacaagggatttgggg

SEQ ID NO: 136 - DNA, 20 bp, synthetic construct
  source 1..20: mol_type = other DNA
agcacagagtctgacattga

SEQ ID NO: 137 - DNA, 20 bp, synthetic construct
  source 1..20: mol_type = other DNA
gtcttaggagatgacgaggt

SEQ ID NO: 138 - DNA, 20 bp, synthetic construct
  source 1..20: mol_type = other DNA
gctgagcaggcggagaagta

SEQ ID NO: 139 - DNA, 20 bp, synthetic construct
  source 1..20: mol_type = other DNA
ttccaatctgcttgagaaac

SEQ ID NO: 140 - DNA, 20 bp, synthetic construct
  source 1..20: mol_type = other DNA
gagatcataatacatctcag

SEQ ID NO: 141 - DNA, 20 bp, synthetic construct
  source 1..20: mol_type = other DNA
gcccatcgaagtactcacca

SEQ ID NO: 142 - DNA, 20 bp, synthetic construct
  source 1..20: mol_type = other DNA
caggcggagaagtaggggtg

SEQ ID NO: 143 - DNA, 20 bp, synthetic construct
  source 1..20: mol_type = other DNA
ttgaaacccagtcaccaatg

SEQ ID NO: 144 - DNA, 20 bp, synthetic construct
  source 1..20: mol_type = other DNA
acataatccaactgagagtc

SEQ ID NO: 145 - DNA, 20 bp, synthetic construct
  source 1..20: mol_type = other DNA
gtgagtgtactgagtctccg

SEQ ID NO: 146 - DNA, 20 bp, synthetic construct
  source 1..20: mol_type = other DNA
caatggagtcacacagcatg

SEQ ID NO: 147 - DNA, 20 bp, synthetic construct
  source 1..20: mol_type = other DNA
ggggtggggggacgcatttg

SEQ ID NO: 148 - DNA, 20 bp, synthetic construct
  source 1..20: mol_type = other DNA
aactgagagtcaggaaacct

SEQ ID NO: 149 - DNA, 20 bp, synthetic construct
  source 1..20: mol_type = other DNA
tgctcacttccataaggata

SEQ ID NO: 150 - DNA, 20 bp, synthetic construct
  source 1..20: mol_type = other DNA
atttggggaggatggggagg

SEQ ID NO: 151 - DNA, 20 bp, synthetic construct
  source 1..20: mol_type = other DNA
cgggctggccacggcaagtg

SEQ ID NO: 152 - DNA, 20 bp, synthetic construct
  source 1..20: mol_type = other DNA
ctcaatgtcagactctgtgc

SEQ ID NO: 153 - DNA, 20 bp, synthetic construct
  source 1..20: mol_type = other DNA
tgcagactattaattgcaag

SEQ ID NO: 154 - DNA, 20 bp, synthetic construct
  source 1..20: mol_type = other DNA
acaggcgtgagccacgggcc

SEQ ID NO: 155 - DNA, 20 bp, synthetic construct
  source 1..20: mol_type = other DNA
catcaattgtgccaggcccg

SEQ ID NO: 156 - DNA, 20 bp, synthetic construct
  source 1..20: mol_type = other DNA
cagcacagagtctgacattg

SEQ ID NO: 157 - DNA, 20 bp, synthetic construct
  source 1..20: mol_type = other DNA
gttgcagactattaattgca

SEQ ID NO: 158 - DNA, 20 bp, synthetic construct
  source 1..20: mol_type = other DNA
gcaagtgtggcaacagggtc

SEQ ID NO: 159 - DNA, 20 bp, synthetic construct
  source 1..20: mol_type = other DNA
tagggtcttggagttttgat

SEQ ID NO: 160 - DNA, 20 bp, synthetic construct
  source 1..20: mol_type = other DNA
aaagcctcacatggcccacg

SEQ ID NO: 161 - DNA, 20 bp, synthetic construct
  source 1..20: mol_type = other DNA
cctcgaggtgagcgtgtgct

SEQ ID NO: 162 - DNA, 20 bp, synthetic construct
  source 1..20: mol_type = other DNA
gcaggcggagaagtaggggt

SEQ ID NO: 163 - DNA, 20 bp, synthetic construct
  source 1..20: mol_type = other DNA
catttttgtggacagttgtg

SEQ ID NO: 164 - DNA, 20 bp, synthetic construct
  source 1..20: mol_type = other DNA
ttgcagactattaattgcaa

SEQ ID NO: 165 - DNA, 20 bp, synthetic construct
  source 1..20: mol_type = other DNA
ctggttgtcagacactccca

SEQ ID NO: 166 - DNA, 20 bp, synthetic construct
  source 1..20: mol_type = other DNA
cagcgaagacaagggatttg

SEQ ID NO: 167 - DNA, 20 bp, synthetic construct
  source 1..20: mol_type = other DNA
tcagcgaagacaagggattt

SEQ ID NO: 168 - DNA, 20 bp, synthetic construct
  source 1..20: mol_type = other DNA
tggatttgaaaataagaagt

SEQ ID NO: 169 - DNA, 20 bp, synthetic construct
  source 1..20: mol_type = other DNA
aggtttaaaaatattgggtg

SEQ ID NO: 170 - DNA, 20 bp, synthetic construct
  source 1..20: mol_type = other DNA
ttggcccagggtggtggcag

SEQ ID NO: 171 - DNA, 20 bp, synthetic construct
  source 1..20: mol_type = other DNA
acagaaaaagctgtcaccaa

SEQ ID NO: 172 - DNA, 20 bp, synthetic construct
  source 1..20: mol_type = other DNA
acaagggatttggggaggat

SEQ ID NO: 173 - DNA, 20 bp, synthetic construct
  source 1..20: mol_type = other DNA
ggcagccccaggccatcaac

SEQ ID NO: 174 - DNA, 20 bp, synthetic construct
  source 1..20: mol_type = other DNA
caggttcccagctgtacaat

SEQ ID NO: 175 - DNA, 20 bp, synthetic construct
  source 1..20: mol_type = other DNA
aggcggagaagtaggggtgg

SEQ ID NO: 176 - DNA, 20 bp, synthetic construct
  source 1..20: mol_type = other DNA
agtgtggtggctgcaggtga

SEQ ID NO: 177 - DNA, 20 bp, synthetic construct
  source 1..20: mol_type = other DNA
agcacattgggcagacacaa

SEQ ID NO: 178 - DNA, 20 bp, synthetic construct
  source 1..20: mol_type = other DNA
ccacgaggccctgcaggaac

SEQ ID NO: 179 - DNA, 20 bp, synthetic construct
  source 1..20: mol_type = other DNA
cgtctccctgccttctcaca

SEQ ID NO: 180 - DNA, 20 bp, synthetic construct
  source 1..20: mol_type = other DNA
agatactaatcccatgtatg

SEQ ID NO: 181 - DNA, 20 bp, synthetic construct
  source 1..20: mol_type = other DNA
ttaggctttgccctcataca

SEQ ID NO: 182 - DNA, 20 bp, synthetic construct
  source 1..20: mol_type = other DNA
ctactcgggggaggctgaag

SEQ ID NO: 183 - DNA, 20 bp, synthetic construct
  source 1..20: mol_type = other DNA
acctcactgcctcagcagcg

SEQ ID NO: 184 - DNA, 20 bp, synthetic construct
  source 1..20: mol_type = other DNA
ttgaggacccaggagaagac

SEQ ID NO: 185 - DNA, 20 bp, synthetic construct
  source 1..20: mol_type = other DNA
cttaggagatgacgaggttg

SEQ ID NO: 186 - DNA, 20 bp, synthetic construct
  source 1..20: mol_type = other DNA
ggcggagaagtaggggtggg

SEQ ID NO: 187 - DNA, 20 bp, synthetic construct
  source 1..20: mol_type = other DNA
ctggtacaatgttgtggacc

SEQ ID NO: 188 - DNA, 20 bp, synthetic construct
  source 1..20: mol_type = other DNA
ggcaaagcattctgggcaga

SEQ ID NO: 189 - DNA, 20 bp, synthetic construct
  source 1..20: mol_type = other DNA
gaaaattacggtgactgctg

SEQ ID NO: 190 - DNA, 20 bp, synthetic construct
  source 1..20: mol_type = other DNA
ggaccaacctagtgttgaca

SEQ ID NO: 191 - DNA, 20 bp, synthetic construct
  source 1..20: mol_type = other DNA
gcttttgttctccagtttgt

SEQ ID NO: 192 - DNA, 20 bp, synthetic construct
  source 1..20: mol_type = other DNA
tgatttaatcaccaacaaac

SEQ ID NO: 193 - DNA, 20 bp, synthetic construct
  source 1..20: mol_type = other DNA
atttagcaatgtttactggg

SEQ ID NO: 194 - DNA, 20 bp, synthetic construct
  source 1..20: mol_type = other DNA
ggcattgaatccaatatgtg

SEQ ID NO: 195 - DNA, 20 bp, synthetic construct
  source 1..20: mol_type = other DNA
gtgttaccatcagagattgc

SEQ ID NO: 196 - DNA, 20 bp, synthetic construct
  source 1..20: mol_type = other DNA
gtaggccattcagtgcttac

SEQ ID NO: 197 - DNA, 20 bp, synthetic construct
  source 1..20: mol_type = other DNA
tttgaaaataagaagttggc

SEQ ID NO: 198 - DNA, 20 bp, synthetic construct
  source 1..20: mol_type = other DNA
cacctcgttccgccggttga

SEQ ID NO: 199 - DNA, 20 bp, synthetic construct
  source 1..20: mol_type = other DNA
acacgctcacctcgagggct

SEQ ID NO: 200 - DNA, 20 bp, synthetic construct
  source 1..20: mol_type = other DNA
gatatccagtaagcactgaa

SEQ ID NO: 201 - DNA, 20 bp, synthetic construct
  source 1..20: mol_type = other DNA
tggatttagcaatgtttact

SEQ ID NO: 202 - DNA, 20 bp, synthetic construct
  source 1..20: mol_type = other DNA
taaagaggacgtttcctggc

SEQ ID NO: 203 - DNA, 20 bp, synthetic construct
  source 1..20: mol_type = other DNA
ttaatctgtcttttgtcgta

SEQ ID NO: 204 - DNA, 20 bp, synthetic construct
  source 1..20: mol_type = other DNA
ataggaaatgccttactgtg

SEQ ID NO: 205 - DNA, 20 bp, synthetic construct
  source 1..20: mol_type = other DNA
cttactggatatctgaacct

SEQ ID NO: 206 - DNA, 20 bp, synthetic construct
  source 1..20: mol_type = other DNA
agtaaacattgctaaatcca

SEQ ID NO: 207 - DNA, 20 bp, synthetic construct
  source 1..20: mol_type = other DNA
gggttcttgccttggggtat

SEQ ID NO: 208 - DNA, 20 bp, synthetic construct
  source 1..20: mol_type = other DNA
gtgaggctttgtggaacttg

SEQ ID NO: 209 - DNA, 20 bp, synthetic construct
  source 1..20: mol_type = other DNA
acatcttactactaccacat

SEQ ID NO: 210 - DNA, 20 bp, synthetic construct
  source 1..20: mol_type = other DNA
ccaccaacaccccttgcctt

SEQ ID NO: 211 - DNA, 20 bp, synthetic construct
  source 1..20: mol_type = other DNA
tttttgggagaccaaaggca

SEQ ID NO: 212 - DNA, 20 bp, synthetic construct
  source 1..20: mol_type = other DNA
tttcatcctccacgctgctg

SEQ ID NO: 213 - DNA, 20 bp, synthetic construct
  source 1..20: mol_type = other DNA
tcagagccacatgaaactag

SEQ ID NO: 214 - DNA, 20 bp, synthetic construct
  source 1..20: mol_type = other DNA
tccattaaaaaacgtacaaa

SEQ ID NO: 215 - DNA, 20 bp, synthetic construct
  source 1..20: mol_type = other DNA
aaaaaaaggacttgacatgc

SEQ ID NO: 216 - DNA, 20 bp, synthetic construct
  source 1..20: mol_type = other DNA
gctcctgaggctggagctag

SEQ ID NO: 217 - DNA, 20 bp, synthetic construct
  source 1..20: mol_type = other DNA
agaaggtgtacctagagtgg

SEQ ID NO: 218 - DNA, 20 bp, synthetic construct
  source 1..20: mol_type = other DNA
ggtgccagcagatttgggtc

SEQ ID NO: 219 - DNA, 20 bp, synthetic construct
  source 1..20: mol_type = other DNA
gatactaatcccatgtatga

SEQ ID NO: 220 - DNA, 20 bp, synthetic construct
  source 1..20: mol_type = other DNA
gaaatccgagagtgagccct

SEQ ID NO: 221 - DNA, 20 bp, synthetic construct
  source 1..20: mol_type = other DNA
aaaacccctgcaatctctga

SEQ ID NO: 222 - DNA, 20 bp, synthetic construct
  source 1..20: mol_type = other DNA
taataatatttatattattc

SEQ ID NO: 223 - DNA, 20 bp, synthetic construct
  source 1..20: mol_type = other DNA
agaaaagaaatgcaagaaat

SEQ ID NO: 224 - DNA, 20 bp, synthetic construct
  source 1..20: mol_type = other DNA
tgaactgtgtcatatgttgc

SEQ ID NO: 225 - DNA, 20 bp, synthetic construct
  source 1..20: mol_type = other DNA
cagaaagctttctgtatctc

SEQ ID NO: 226 - DNA, 20 bp, synthetic construct
  source 1..20: mol_type = other DNA
agaagctgggactggctgtg

SEQ ID NO: 227 - DNA, 20 bp, synthetic construct
  source 1..20: mol_type = other DNA
cttctcttgagggtggggat

SEQ ID NO: 228 - DNA, 20 bp, synthetic construct
  source 1..20: mol_type = other DNA
gcccagaatgctttgcccac

SEQ ID NO: 229 - DNA, 20 bp, synthetic construct
  source 1..20: mol_type = other DNA
agcaggcggagaagtagggg

SEQ ID NO: 230 - DNA, 20 bp, synthetic construct
  source 1..20: mol_type = other DNA
tctcctctagctccagcctc

SEQ ID NO: 231 - DNA, 20 bp, synthetic construct
  source 1..20: mol_type = other DNA
ggttaaatgaaagggaaagc

SEQ ID NO: 232 - DNA, 20 bp, synthetic construct
  source 1..20: mol_type = other DNA
ctaaagcgcgcctttcctca

SEQ ID NO: 233 - DNA, 20 bp, synthetic construct
  source 1..20: mol_type = other DNA
agaagatgctggcttggccc

SEQ ID NO: 234 - DNA, 20 bp, synthetic construct
  source 1..20: mol_type = other DNA
caggagctccttgctcttcc

SEQ ID NO: 235 - DNA, 20 bp, synthetic construct
  source 1..20: mol_type = other DNA
ctgtgtcatatgttgctggt

SEQ ID NO: 236 - DNA, 20 bp, synthetic construct
  source 1..20: mol_type = other DNA
tagcacattgggcagacaca

SEQ ID NO: 237 - DNA, 20 bp, synthetic construct
  source 1..20: mol_type = other DNA
gaagcatatcacttctgcta

SEQ ID NO: 238 - DNA, 20 bp, synthetic construct
  source 1..20: mol_type = other DNA
gttgtggaccgggctggcca

SEQ ID NO: 239 - DNA, 20 bp, synthetic construct
  source 1..20: mol_type = other DNA
tccagtggcctgtcttctcc

SEQ ID NO: 240 - DNA, 20 bp, synthetic construct
  source 1..20: mol_type = other DNA
aatttcctgctgtgacaaca

SEQ ID NO: 241 - DNA, 20 bp, synthetic construct
  source 1..20: mol_type = other DNA
caagggatttggggaggatg

SEQ ID NO: 242 - DNA, 20 bp, synthetic construct
  source 1..20: mol_type = other DNA
aggaagtagggaacagggac

SEQ ID NO: 243 - DNA, 20 bp, synthetic construct
  source 1..20: mol_type = other DNA
acctccatctctataaaaat

SEQ ID NO: 244 - DNA, 20 bp, synthetic construct
  source 1..20: mol_type = other DNA
ttacttctctttggctatga

SEQ ID NO: 245 - DNA, 20 bp, synthetic construct
  source 1..20: mol_type = other DNA
tcccactggcccacgttgca

SEQ ID NO: 246 - DNA, 20 bp, synthetic construct
  source 1..20: mol_type = other DNA
cagccatgttgcttctcctt

SEQ ID NO: 247 - DNA, 20 bp, synthetic construct
  source 1..20: mol_type = other DNA
tatttttctccctgtttaga

SEQ ID NO: 248 - DNA, 20 bp, synthetic construct
  source 1..20: mol_type = other DNA
gggcaaagcattctgggcag

SEQ ID NO: 249 - DNA, 20 bp, synthetic construct
  source 1..20: mol_type = other DNA
gaaggaggcgagacacctgt

SEQ ID NO: 250 - DNA, 20 bp, synthetic construct
  source 1..20: mol_type = other DNA
atttcctgctgtgacaacaa

SEQ ID NO: 251 - DNA, 20 bp, synthetic construct
  source 1..20: mol_type = other DNA
aagaaaagaaatgcaagaaa

SEQ ID NO: 252 - DNA, 20 bp, synthetic construct
  source 1..20: mol_type = other DNA
gcttctcttgagggtgggga

SEQ ID NO: 253 - DNA, 20 bp, synthetic construct
  source 1..20: mol_type = other DNA
attaatctgtcttttgtcgt

SEQ ID NO: 254 - DNA, 20 bp, synthetic construct
  source 1..20: mol_type = other DNA
acaggaggaacgcacgcagc

SEQ ID NO: 255 - DNA, 20 bp, synthetic construct
  source 1..20: mol_type = other DNA
cctggttgtcagacactccc

SEQ ID NO: 256 - DNA, 20 bp, synthetic construct
  source 1..20: mol_type = other DNA
aggtcaacatcaattgtgcc

SEQ ID NO: 257 - DNA, 20 bp, synthetic construct
  source 1..20: mol_type = other DNA
gacaagggatttggggagga

SEQ ID NO: 258 - DNA, 20 bp, synthetic construct
  source 1..20: mol_type = other DNA
ggcttagatctaaatactcc

SEQ ID NO: 259 - DNA, 20 bp, synthetic construct
  source 1..20: mol_type = other DNA
gagcacacagcctcacagta

SEQ ID NO: 260 - DNA, 20 bp, synthetic construct
  source 1..20: mol_type = other DNA
gttaccatcagagattgcag

SEQ ID NO: 261 - DNA, 20 bp, synthetic construct
  source 1..20: mol_type = other DNA
ttggatttagcaatgtttac

SEQ ID NO: 262 - DNA, 20 bp, synthetic construct
  source 1..20: mol_type = other DNA
cttggagttttgataggcac

SEQ ID NO: 263 - DNA, 20 bp, synthetic construct
  source 1..20: mol_type = other DNA
atttaataaaagagaaacct

SEQ ID NO: 264 - DNA, 20 bp, synthetic construct
  source 1..20: mol_type = other DNA
tttaataaaagagaaacctt

SEQ ID NO: 265 - DNA, 20 bp, synthetic construct
  source 1..20: mol_type = other DNA
attaaaaagcagggagaagg

SEQ ID NO: 266 - DNA, 20 bp, synthetic construct
  source 1..20: mol_type = other DNA
gagttccagaagcatctgtc

SEQ ID NO: 267 - DNA, 20 bp, synthetic construct
  source 1..20: mol_type = other DNA
gaagatgctggcttggccca

SEQ ID NO: 268 - DNA, 20 bp, synthetic construct
  source 1..20: mol_type = other DNA
gctagaggagagagagtctt

SEQ ID NO: 269 - DNA, 20 bp, synthetic construct
  source 1..20: mol_type = other DNA
cgaaggaggcgagacacctg

SEQ ID NO: 270 - DNA, 20 bp, synthetic construct
  source 1..20: mol_type = other DNA
gacaaacagcctttgtcttc

SEQ ID NO: 271 - DNA, 20 bp, synthetic construct
  source 1..20: mol_type = other DNA
tattggattcaatgccaata

SEQ ID NO: 272 - DNA, 20 bp, synthetic construct
  source 1..20: mol_type = other DNA
tccccaccctcaagagaagc

SEQ ID NO: 273 - DNA, 20 bp, synthetic construct
  source 1..20: mol_type = other DNA
tcacagcagagtggcccttt

SEQ ID NO: 274 - DNA, 20 bp, synthetic construct
  source 1..20: mol_type = other DNA
gattgagagggaattggaac

SEQ ID NO: 275 - DNA, 20 bp, synthetic construct
  source 1..20: mol_type = other DNA
ttttgggagaccaaaggcaa

SEQ ID NO: 276 - DNA, 20 bp, synthetic construct
  source 1..20: mol_type = other DNA
cccagcttctcttgagggtg

SEQ ID NO: 277 - DNA, 20 bp, synthetic construct
  source 1..20: mol_type = other DNA
gactgcactcacctcggaac

SEQ ID NO: 278 - DNA, 20 bp, synthetic construct
  source 1..20: mol_type = other DNA
ggcaacagggtccggttccg

SEQ ID NO: 279 - DNA, 20 bp, synthetic construct
  source 1..20: mol_type = other DNA
tgacgaggttgggggtgtcc

SEQ ID NO: 280 - DNA, 20 bp, synthetic construct
  source 1..20: mol_type = other DNA
taggctttgccctcatacat

SEQ ID NO: 281 - DNA, 20 bp, synthetic construct
  source 1..20: mol_type = other DNA
tgaagcatatcacttctgct

SEQ ID NO: 282 - DNA, 20 bp, synthetic construct
  source 1..20: mol_type = other DNA
aatcagaattcttggtttca

SEQ ID NO: 283 - DNA, 20 bp, synthetic construct
  source 1..20: mol_type = other DNA
gatgttctaaaaatccttat

SEQ ID NO: 284 - DNA, 20 bp, synthetic construct
  source 1..20: mol_type = other DNA
agacaaatgctttctgcggg

SEQ ID NO: 285 - DNA, 20 bp, synthetic construct
  source 1..20: mol_type = other DNA
tgttaccatcagagattgca

SEQ ID NO: 286 - DNA, 20 bp, synthetic construct
  source 1..20: mol_type = other DNA
cccgccaaagcgttttgcgc

SEQ ID NO: 287 - DNA, 20 bp, synthetic construct
  source 1..20: mol_type = other DNA
cagttgtgtggaaatatgat

SEQ ID NO: 288 - DNA, 20 bp, synthetic construct
  source 1..20: mol_type = other DNA
acgatgtccacaaagaagac

SEQ ID NO: 289 - DNA, 20 bp, synthetic construct
  source 1..20: mol_type = other DNA
ttaggcgacaggcatattca

SEQ ID NO: 290 - DNA, 20 bp, synthetic construct
  source 1..20: mol_type = other DNA
gctggtttaaagcactgatg

SEQ ID NO: 291 - DNA, 20 bp, synthetic construct
  source 1..20: mol_type = other DNA
ccaggaaacgtcctctttat

SEQ ID NO: 292 - DNA, 20 bp, synthetic construct
  source 1..20: mol_type = other DNA
tcagcccattccctataaag

SEQ ID NO: 293 - DNA, 20 bp, synthetic construct
  source 1..20: mol_type = other DNA
agaaagctttctgtatctca

SEQ ID NO: 294 - DNA, 20 bp, synthetic construct
  source 1..20: mol_type = other DNA
acttattaaataagtatgga

SEQ ID NO: 295 - DNA, 20 bp, synthetic construct
  source 1..20: mol_type = other DNA
attggattgcacccaggaat

SEQ ID NO: 296 - DNA, 20 bp, synthetic construct
  source 1..20: mol_type = other DNA
tgctttcagagccaattcct

SEQ ID NO: 297 - DNA, 20 bp, synthetic construct
  source 1..20: mol_type = other DNA
ttctgccccttggtccaaaa

SEQ ID NO: 298 - DNA, 20 bp, synthetic construct
  source 1..20: mol_type = other DNA
caaatggtgagctgagggac

SEQ ID NO: 299 - DNA, 20 bp, synthetic construct
  source 1..20: mol_type = other DNA
cctttagcttccaccactct

SEQ ID NO: 300 - DNA, 20 bp, synthetic construct
  source 1..20: mol_type = other DNA
aggtcaacctagtttaaata

SEQ ID NO: 301 - DNA, 20 bp, synthetic construct
  source 1..20: mol_type = other DNA
ttggttgcctgtcttctttg

SEQ ID NO: 302 - DNA, 20 bp, synthetic construct
  source 1..20: mol_type = other DNA
agaaatccgagagtgagccc

SEQ ID NO: 303 - DNA, 20 bp, synthetic construct
  source 1..20: mol_type = other DNA
actgcaaccttccgcccgcc

SEQ ID NO: 304 - DNA, 20 bp, synthetic construct
  source 1..20: mol_type = other DNA
atcgattgaacccaggcggg

SEQ ID NO: 305 - DNA, 20 bp, synthetic construct
  source 1..20: mol_type = other DNA
taggcgacaggcatattcat

SEQ ID NO: 306 - DNA, 20 bp, synthetic construct
  source 1..20: mol_type = other DNA
ggcgtgttccaggaagagca

SEQ ID NO: 307 - DNA, 20 bp, synthetic construct
  source 1..20: mol_type = other DNA
caagcacacgctcacctcga

SEQ ID NO: 308 - DNA, 20 bp, synthetic construct
  source 1..20: mol_type = other DNA
tttattattatatgcatcat

SEQ ID NO: 309 - DNA, 20 bp, synthetic construct
  source 1..20: mol_type = other DNA
atctcagggttcttgccttg

SEQ ID NO: 310 - DNA, 20 bp, synthetic construct
  source 1..20: mol_type = other DNA
cttatttaataagttttaca

SEQ ID NO: 311 - DNA, 20 bp, synthetic construct
  source 1..20: mol_type = other DNA
ggcaaccaatttctaacatc

SEQ ID NO: 312 - DNA, 20 bp, synthetic construct
  source 1..20: mol_type = other DNA
agaagcagtggagggtaaat

SEQ ID NO: 313 - DNA, 20 bp, synthetic construct
  source 1..20: mol_type = other DNA
atcacagaagccatctaaac

SEQ ID NO: 314 - DNA, 20 bp, synthetic construct
  source 1..20: mol_type = other DNA
gctggcttggcccagggtgg

SEQ ID NO: 315 - DNA, 20 bp, synthetic construct
  source 1..20: mol_type = other DNA
tttagcaatgtttactgggt

SEQ ID NO: 316 - DNA, 20 bp, synthetic construct
  source 1..20: mol_type = other DNA
ctgtttgttcagattcgtgt

SEQ ID NO: 317 - DNA, 20 bp, synthetic construct
  source 1..20: mol_type = other DNA
actgagaaaactgcagaagc

SEQ ID NO: 318 - DNA, 20 bp, synthetic construct
  source 1..20: mol_type = other DNA
taaattaattaaaattggcc

SEQ ID NO: 319 - DNA, 20 bp, synthetic construct
  source 1..20: mol_type = other DNA
tctccaggtgccctgcaacg

SEQ ID NO: 320 - DNA, 20 bp, synthetic construct
  source 1..20: mol_type = other DNA
ttcccactggcccacgttgc

SEQ ID NO: 321 - DNA, 20 bp, synthetic construct
  source 1..20: mol_type = other DNA
tcgcttagcatatgtggttg

SEQ ID NO: 322 - DNA, 20 bp, synthetic construct
  source 1..20: mol_type = other DNA
gatgcttctggaactcaagg

SEQ ID NO: 323 - DNA, 20 bp, synthetic construct
  source 1..20: mol_type = other DNA
cagcatgtgccaagccctcg

SEQ ID NO: 324 - DNA, 20 bp, synthetic construct
  source 1..20: mol_type = other DNA
tcacaacaacttcggcctcc

SEQ ID NO: 325 - DNA, 20 bp, synthetic construct
  source 1..20: mol_type = other DNA
atcatcgcagaaggttgcat

SEQ ID NO: 326 - DNA, 20 bp, synthetic construct
  source 1..20: mol_type = other DNA
ggcctttaacagcacttgaa

SEQ ID NO: 327 - DNA, 20 bp, synthetic construct
  source 1..20: mol_type = other DNA
cgaggcgggcaaaccacttg

SEQ ID NO: 328 - DNA, 20 bp, synthetic construct
  source 1..20: mol_type = other DNA
tctgaagggccctgtcagtt

SEQ ID NO: 329 - DNA, 20 bp, synthetic construct
  source 1..20: mol_type = other DNA
agaaatatctcagcctctaa

SEQ ID NO: 330 - DNA, 20 bp, synthetic construct
  source 1..20: mol_type = other DNA
gatgctggcttggcccaggg

SEQ ID NO: 331 - DNA, 20 bp, synthetic construct
  source 1..20: mol_type = other DNA
ccacggcaagtgtggcaaca

SEQ ID NO: 332 - DNA, 20 bp, synthetic construct
  source 1..20: mol_type = other DNA
ccaagcacacgctcacctcg

SEQ ID NO: 333 - DNA, 20 bp, synthetic construct
  source 1..20: mol_type = other DNA
catcttcacaccgcaatgtt

SEQ ID NO: 334 - DNA, 20 bp, synthetic construct
  source 1..20: mol_type = other DNA
ttgtgtggaaatatgattgg

SEQ ID NO: 335 - DNA, 20 bp, synthetic construct
  source 1..20: mol_type = other DNA
ctgcttagattttcttgctg

SEQ ID NO: 336 - DNA, 20 bp, synthetic construct
  source 1..20: mol_type = other DNA
ctccaggtgccctgcaacgt

SEQ ID NO: 337 - DNA, 20 bp, synthetic construct
  source 1..20: mol_type = other DNA
gatgcatcccattgtacagc

SEQ ID NO: 338 - DNA, 20 bp, synthetic construct
  source 1..20: mol_type = other DNA
gaaggtttcagcgaagacaa

SEQ ID NO: 339 - DNA, 20 bp, synthetic construct
  source 1..20: mol_type = other DNA
gtagtgcccacaggatctgc

SEQ ID NO: 340 - DNA, 20 bp, synthetic construct
  source 1..20: mol_type = other DNA
tcaggttcccagctgtacaa

SEQ ID NO: 341 - DNA, 20 bp, synthetic construct
  source 1..20: mol_type = other DNA
tccaaaattggattgcaccc

SEQ ID NO: 342 - DNA, 20 bp, synthetic construct
  source 1..20: mol_type = other DNA
ctccctctggtacaatgttg

SEQ ID NO: 343 - DNA, 20 bp, synthetic construct
  source 1..20: mol_type = other DNA
cacctgtgggcaaagcattc

SEQ ID NO: 344 - DNA, 20 bp, synthetic construct
  source 1..20: mol_type = other DNA
aggaccatccagggcaaatt

SEQ ID NO: 345 - DNA, 20 bp, synthetic construct
  source 1..20: mol_type = other DNA
agtaacaaaagtcatcagcc

SEQ ID NO: 346 - DNA, 20 bp, synthetic construct
  source 1..20: mol_type = other DNA
ctgcaaccttccgcccgcct

SEQ ID NO: 347 - DNA, 20 bp, synthetic construct
  source 1..20: mol_type = other DNA
acagatgcttctggaactca

SEQ ID NO: 348 - DNA, 20 bp, synthetic construct
  source 1..20: mol_type = other DNA
gggcgggcggaaggggaaga

SEQ ID NO: 349 - DNA, 20 bp, synthetic construct
  source 1..20: mol_type = other DNA
ccctgttgccacacttgccg

SEQ ID NO: 350 - DNA, 20 bp, synthetic construct
  source 1..20: mol_type = other DNA
cgtttcctggccggacgcag

SEQ ID NO: 351 - DNA, 20 bp, synthetic construct
  source 1..20: mol_type = other DNA
cagccttgtcaacactaggt

SEQ ID NO: 352 - DNA, 20 bp, synthetic construct
  source 1..20: mol_type = other DNA
ggaccatccagggcaaattg

SEQ ID NO: 353 - DNA, 20 bp, synthetic construct
  source 1..20: mol_type = other DNA
gtaacaaaagtcatcagcct

SEQ ID NO: 354 - DNA, 20 bp, synthetic construct
  source 1..20: mol_type = other DNA
atgcatcccattgtacagct

SEQ ID NO: 355 - DNA, 20 bp, synthetic construct
  source 1..20: mol_type = other DNA
tctcgctgtgttgctcaggg

SEQ ID NO: 356 - DNA, 20 bp, synthetic construct
  source 1..20: mol_type = other DNA
actggggaagtagtgcccac

SEQ ID NO: 357 - DNA, 20 bp, synthetic construct
  source 1..20: mol_type = other DNA
gctgaagcagatacaccaca

SEQ ID NO: 358 - DNA, 20 bp, synthetic construct
  source 1..20: mol_type = other DNA
actgacagcacccaacattg

SEQ ID NO: 359 - DNA, 20 bp, synthetic construct
  source 1..20: mol_type = other DNA
ccatcttcacaccgcaatgt

SEQ ID NO: 360 - DNA, 20 bp, synthetic construct
  source 1..20: mol_type = other DNA
tacagtggacacaaaaaaag

SEQ ID NO: 361 - DNA, 20 bp, synthetic construct
  source 1..20: mol_type = other DNA
gagtctcgctgtgttgctca

SEQ ID NO: 362 - DNA, 20 bp, synthetic construct
  source 1..20: mol_type = other DNA
attactgaccacagtttcaa

SEQ ID NO: 363 - DNA, 20 bp, synthetic construct
  source 1..20: mol_type = other DNA
atgtgctagatgatccatag

SEQ ID NO: 364 - DNA, 20 bp, synthetic construct
  source 1..20: mol_type = other DNA
tatccagatggagatgcata

SEQ ID NO: 365 - DNA, 20 bp, synthetic construct
  source 1..20: mol_type = other DNA
tctgaggtaccatatcctta

SEQ ID NO: 366 - DNA, 20 bp, synthetic construct
  source 1..20: mol_type = other DNA
caggaaacgtcctctttata

SEQ ID NO: 367 - DNA, 20 bp, synthetic construct
  source 1..20: mol_type = other DNA
aattgccttcacttaggcgt

SEQ ID NO: 368 - DNA, 20 bp, synthetic construct
  source 1..20: mol_type = other DNA
agagggagcctttgaaactg

SEQ ID NO: 369 - DNA, 20 bp, synthetic construct
  source 1..20: mol_type = other DNA
gcgtgtgcttggcgtgttcc

SEQ ID NO: 370 - DNA, 20 bp, synthetic construct
  source 1..20: mol_type = other DNA
ttgaaaataagaagttggct

SEQ ID NO: 371 - DNA, 20 bp, synthetic construct
  source 1..20: mol_type = other DNA
atctgcgggcagattacgcg

SEQ ID NO: 372 - DNA, 20 bp, synthetic construct
  source 1..20: mol_type = other DNA
gtaagcactgaatggcctac

SEQ ID NO: 373 - DNA, 20 bp, synthetic construct
  source 1..20: mol_type = other DNA
caggaccatccagggcaaat

SEQ ID NO: 374 - DNA, 20 bp, synthetic construct
  source 1..20: mol_type = other DNA
attctgccccttggtccaaa

SEQ ID NO: 375 - DNA, 20 bp, synthetic construct
  source 1..20: mol_type = other DNA
atgcataaggcccatagaca

SEQ ID NO: 376 - DNA, 20 bp, synthetic construct
  source 1..20: mol_type = other DNA
atgcatctttcccatgtcta

SEQ ID NO: 377 - DNA, 20 bp, synthetic construct
  source 1..20: mol_type = other DNA
tcctgggtgcaatccaattt

SEQ ID NO: 378 - DNA, 20 bp, synthetic construct
  source 1..20: mol_type = other DNA
gcctttcctcatgggttgca

SEQ ID NO: 379 - DNA, 20 bp, synthetic construct
  source 1..20: mol_type = other DNA
agagctgccatttgcggggc

SEQ ID NO: 380 - DNA, 20 bp, synthetic construct
  source 1..20: mol_type = other DNA
acaccccaatttgccctgga

SEQ ID NO: 381 - DNA, 20 bp, synthetic construct
  source 1..20: mol_type = other DNA
tttcgctgtgtctgtctacc

SEQ ID NO: 382 - DNA, 20 bp, synthetic construct
  source 1..20: mol_type = other DNA
ttacaaaaatgatccgggcg

SEQ ID NO: 383 - DNA, 20 bp, synthetic construct
  source 1..20: mol_type = other DNA
ctgctttcagagccaattcc

SEQ ID NO: 384 - DNA, 20 bp, synthetic construct
  source 1..20: mol_type = other DNA
ccccaccctcaagagaagct

SEQ ID NO: 385 - DNA, 20 bp, synthetic construct
  source 1..20: mol_type = other DNA
ggttgcccaggggctggggg

SEQ ID NO: 386 - DNA, 20 bp, synthetic construct
  source 1..20: mol_type = other DNA
gtccacaacattgtaccaga

SEQ ID NO: 387 - DNA, 20 bp, synthetic construct
  source 1..20: mol_type = other DNA
acctgtgggcaaagcattct

SEQ ID NO: 388 - DNA, 20 bp, synthetic construct
  source 1..20: mol_type = other DNA
ttccaagtagctcggatcac

SEQ ID NO: 389 - DNA, 20 bp, synthetic construct
  source 1..20: mol_type = other DNA
cagtgtggtggctgcaggtg

SEQ ID NO: 390 - DNA, 20 bp, synthetic construct
  source 1..20: mol_type = other DNA
attttcccacattatgtata

SEQ ID NO: 391 - DNA, 20 bp, synthetic construct
  source 1..20: mol_type = other DNA
gggatgagctcttaaaagaa

SEQ ID NO: 392 - DNA, 20 bp, synthetic construct
  source 1..20: mol_type = other DNA
tagaatttaatattccaaac

SEQ ID NO: 393 - DNA, 20 bp, synthetic construct
  source 1..20: mol_type = other DNA
gaggtttcctgactctcagt

SEQ ID NO: 394 - DNA, 20 bp, synthetic construct
  source 1..20: mol_type = other DNA
aatctaagcagactctttca

SEQ ID NO: 395 - DNA, 20 bp, synthetic construct
  source 1..20: mol_type = other DNA
tttgggagaccaaaggcaag

SEQ ID NO: 396 - DNA, 20 bp, synthetic construct
  source 1..20: mol_type = other DNA
aatgtaccttgcaacccatg

SEQ ID NO: 397 - DNA, 20 bp, synthetic construct
  source 1..20: mol_type = other DNA
agtgaaatatttcgattatg

SEQ ID NO: 398 - DNA, 20 bp, synthetic construct
  source 1..20: mol_type = other DNA
cagatgcttctggaactcaa

SEQ ID NO: 399 - DNA, 20 bp, synthetic construct
  source 1..20: mol_type = other DNA
agtagtgcccacaggatctg

SEQ ID NO: 400 - DNA, 20 bp, synthetic construct
  source 1..20: mol_type = other DNA
ctcctgggcccttgttccac

SEQ ID NO: 401 - DNA, 20 bp, synthetic construct
  source 1..20: mol_type = other DNA
taataagttttacatggcac

SEQ ID NO: 402 - DNA, 20 bp, synthetic construct
  source 1..20: mol_type = other DNA
tctgctcagaatttctcctc

SEQ ID NO: 403 - DNA, 20 bp, synthetic construct
  source 1..20: mol_type = other DNA
aggagggggcaaggagtaaa

SEQ ID NO: 404 - DNA, 20 bp, synthetic construct
  source 1..20: mol_type = other DNA
tagagctgccatttgcgggg

SEQ ID NO: 405 - DNA, 20 bp, synthetic construct
  source 1..20: mol_type = other DNA
acagtttcaaaggctccctc

SEQ ID NO: 406 - DNA, 20 bp, synthetic construct
  source 1..20: mol_type = other DNA
cggtagccactagtttcatg

SEQ ID NO: 407 - DNA, 20 bp, synthetic construct
  source 1..20: mol_type = other DNA
ccttacaccccaatttgccc

SEQ ID NO: 408 - DNA, 20 bp, synthetic construct
  source 1..20: mol_type = other DNA
aagaaatacaataaattagc

SEQ ID NO: 409 - DNA, 20 bp, synthetic construct
  source 1..20: mol_type = other DNA
ctaaacctgagtgtaaaaaa

SEQ ID NO: 410 - DNA, 20 bp, synthetic construct
  source 1..20: mol_type = other DNA
ccagtcccagcttctcttga

SEQ ID NO: 411 - DNA, 20 bp, synthetic construct
  source 1..20: mol_type = other DNA
agaaacggaagtctgaggct

SEQ ID NO: 412 - DNA, 20 bp, synthetic construct
  source 1..20: mol_type = other DNA
cccaggagaagacaggccac

SEQ ID NO: 413 - DNA, 20 bp, synthetic construct
  source 1..20: mol_type = other DNA
aagtcgatccgtggttgccc

SEQ ID NO: 414 - DNA, 20 bp, synthetic construct
  source 1..20: mol_type = other DNA
aagaaacggaagtctgaggc

SEQ ID NO: 415 - DNA, 20 bp, synthetic construct
  source 1..20: mol_type = other DNA
gccacggcaagtgtggcaac

SEQ ID NO: 416 - DNA, 20 bp, synthetic construct
  source 1..20: mol_type = other DNA
atgacgaggttgggggtgtc

SEQ ID NO: 417 - DNA, 20 bp, synthetic construct
  source 1..20: mol_type = other DNA
aaagcctaatcacctcccaa

SEQ ID NO: 418 - DNA, 20 bp, synthetic construct
  source 1..20: mol_type = other DNA
ggtctcccaaaaagaggatc

SEQ ID NO: 419 - DNA, 20 bp, synthetic construct
  source 1..20: mol_type = other DNA
taggtttgatggcctgcttc

SEQ ID NO: 420 - DNA, 20 bp, synthetic construct
  source 1..20: mol_type = other DNA
cttggcgctatactaggact

SEQ ID NO: 421 - DNA, 20 bp, synthetic construct
  source 1..20: mol_type = other DNA
ggaaacgctaccatcaaata

SEQ ID NO: 422 - DNA, 20 bp, synthetic construct
  source 1..20: mol_type = other DNA
cctactgtgtgccctaccct

SEQ ID NO: 423 - DNA, 20 bp, synthetic construct
  source 1..20: mol_type = other DNA
catccctctggcccagggta

SEQ ID NO: 424 - DNA, 20 bp, synthetic construct
  source 1..20: mol_type = other DNA
tggagcatccctctggccca

SEQ ID NO: 425 - DNA, 20 bp, synthetic construct
  source 1..20: mol_type = other DNA
tgtagatgctctgcttttga

SEQ ID NO: 426 - DNA, 20 bp, synthetic construct
  source 1..20: mol_type = other DNA
gtagtcccagctaccatggg

SEQ ID NO: 427 - DNA, 20 bp, synthetic construct
  source 1..20: mol_type = other DNA
gcttggcgctatactaggac

SEQ ID NO: 428 - DNA, 20 bp, synthetic construct
  source 1..20: mol_type = other DNA
aaaaaaacaagtctgggaaa

SEQ ID NO: 429 - DNA, 20 bp, synthetic construct
  source 1..20: mol_type = other DNA
tgccccctccctcctgaagc

SEQ ID NO: 430 - DNA, 20 bp, synthetic construct
  source 1..20: mol_type = other DNA
ctaaaattacaaaaatgatc

SEQ ID NO: 431 - DNA, 20 bp, synthetic construct
  source 1..20: mol_type = other DNA
tctctctgctcacttccata

SEQ ID NO: 432 - DNA, 20 bp, synthetic construct
  source 1..20: mol_type = other DNA
tcctctttttgggagaccaa

SEQ ID NO: 433 - DNA, 20 bp, synthetic construct
  source 1..20: mol_type = other DNA
tcacagaagccatctaaaca

SEQ ID NO: 434 - DNA, 20 bp, synthetic construct
  source 1..20: mol_type = other DNA
aatgtttactgggtgggtgg

SEQ ID NO: 435 - DNA, 20 bp, synthetic construct
  source 1..20: mol_type = other DNA
gcgcacatgtctcttagcct

SEQ ID NO: 436 - DNA, 20 bp, synthetic construct
  source 1..20: mol_type = other DNA
tgctggtttaaagcactgat

SEQ ID NO: 437 - DNA, 20 bp, synthetic construct
  source 1..20: mol_type = other DNA
gcctttggtctcccaaaaag

SEQ ID NO: 438 - DNA, 20 bp, synthetic construct
  source 1..20: mol_type = other DNA
cagtgccagatcctcttttt

SEQ ID NO: 439 - DNA, 20 bp, synthetic construct
  source 1..20: mol_type = other DNA
cgggcagattacgcgtggca

SEQ ID NO: 440 - DNA, 20 bp, synthetic construct
  source 1..20: mol_type = other DNA
gagagtcttaggagatgacg

SEQ ID NO: 441 - DNA, 20 bp, synthetic construct
  source 1..20: mol_type = other DNA
aaggggcaagctagtgatac

SEQ ID NO: 442 - DNA, 20 bp, synthetic construct
  source 1..20: mol_type = other DNA
gtggagtttggccaggctgt

SEQ ID NO: 443 - DNA, 20 bp, synthetic construct
  source 1..20: mol_type = other DNA
cccactcttctccgacagcc

SEQ ID NO: 444 - DNA, 20 bp, synthetic construct
  source 1..20: mol_type = other DNA
atatggcacctggacacaca

SEQ ID NO: 445 - DNA, 20 bp, synthetic construct
  source 1..20: mol_type = other DNA
gcatttgtctgtagacagcc

SEQ ID NO: 446 - DNA, 20 bp, synthetic construct
  source 1..20: mol_type = other DNA
gttgcccaggggctggggga

SEQ ID NO: 447 - DNA, 20 bp, synthetic construct
  source 1..20: mol_type = other DNA
agatgcttctggaactcaag

SEQ ID NO: 448 - DNA, 20 bp, synthetic construct
  source 1..20: mol_type = other DNA
gctggattctgactacactg

SEQ ID NO: 449 - DNA, 20 bp, synthetic construct
  source 1..20: mol_type = other DNA
aaaaaaaaagtcattgttct

SEQ ID NO: 450 - DNA, 20 bp, synthetic construct
  source 1..20: mol_type = other DNA
aggcctgggggtggagcccg

SEQ ID NO: 451 - DNA, 20 bp, synthetic construct
  source 1..20: mol_type = other DNA
attaatgtagcaaagtggac

SEQ ID NO: 452 - DNA, 20 bp, synthetic construct
  source 1..20: mol_type = other DNA
gccctgcaacgtgggccagt

SEQ ID NO: 453 - DNA, 20 bp, synthetic construct
  source 1..20: mol_type = other DNA
ttctcttacaccgcacatat

SEQ ID NO: 454 - DNA, 20 bp, synthetic construct
  source 1..20: mol_type = other DNA
aaaaataggtttaaaaatat

SEQ ID NO: 455 - DNA, 20 bp, synthetic construct
  source 1..20: mol_type = other DNA
cacaacaacttcggcctcct

SEQ ID NO: 456 - DNA, 20 bp, synthetic construct
  source 1..20: mol_type = other DNA
gcaaggttttattgagtgga

SEQ ID NO: 457 - DNA, 20 bp, synthetic construct
  source 1..20: mol_type = other DNA
tatctcagggttcttgcctt

SEQ ID NO: 458 - DNA, 20 bp, synthetic construct
  source 1..20: mol_type = other DNA
atgtctgggaaggccgggtg

SEQ ID NO: 459 - DNA, 20 bp, synthetic construct
  source 1..20: mol_type = other DNA
tgcatctttcccatgtctat

SEQ ID NO: 460 - DNA, 20 bp, synthetic construct
  source 1..20: mol_type = other DNA
tgtgaaagtgttactatttt

SEQ ID NO: 461 - DNA, 20 bp, synthetic construct
  source 1..20: mol_type = other DNA
aagaaagagaatagatagta

SEQ ID NO: 462 - DNA, 20 bp, synthetic construct
  source 1..20: mol_type = other DNA
ctagcctatgagctttatga

SEQ ID NO: 463 - DNA, 20 bp, synthetic construct
  source 1..20: mol_type = other DNA
tccacgctgctgaggcagtg

SEQ ID NO: 464 - DNA, 20 bp, synthetic construct
  source 1..20: mol_type = other DNA
tttctatggccagcttcagg

SEQ ID NO: 465 - DNA, 20 bp, synthetic construct
  source 1..20: mol_type = other DNA
gggaaggaacgctctatggt

SEQ ID NO: 466 - DNA, 20 bp, synthetic construct
  source 1..20: mol_type = other DNA
gggcagattacgcgtggcag

SEQ ID NO: 467 - DNA, 20 bp, synthetic construct
  source 1..20: mol_type = other DNA
cttgccatcataaagctcat

SEQ ID NO: 468 - DNA, 20 bp, synthetic construct
  source 1..20: mol_type = other DNA
gagttttgataggcacagga

SEQ ID NO: 469 - DNA, 20 bp, synthetic construct
  source 1..20: mol_type = other DNA
gcaagaaatgggtccaaaat

SEQ ID NO: 470 - DNA, 20 bp, synthetic construct
  source 1..20: mol_type = other DNA
ggatgggacagagcatctcc

SEQ ID NO: 471 - DNA, 20 bp, synthetic construct
  source 1..20: mol_type = other DNA
gttccgccggttgatggcct

SEQ ID NO: 472 - DNA, 20 bp, synthetic construct
  source 1..20: mol_type = other DNA
tttttacactcaggtttagt

SEQ ID NO: 473 - DNA, 20 bp, synthetic construct
  source 1..20: mol_type = other DNA
tgccctgcaacgtgggccag

SEQ ID NO: 474 - DNA, 20 bp, synthetic construct
  source 1..20: mol_type = other DNA
tgggccagtgggaaggtttg

SEQ ID NO: 475 - DNA, 20 bp, synthetic construct
  source 1..20: mol_type = other DNA
gacaaatgctttctgcggga

SEQ ID NO: 476 - DNA, 20 bp, synthetic construct
  source 1..20: mol_type = other DNA
cagattacgcgtggcagggg

SEQ ID NO: 477 - DNA, 20 bp, synthetic construct
  source 1..20: mol_type = other DNA
gccctgcaggaactggctcc

SEQ ID NO: 478 - DNA, 20 bp, synthetic construct
  source 1..20: mol_type = other DNA
tctttagcaggtagagtacc

SEQ ID NO: 479 - DNA, 20 bp, synthetic construct
  source 1..20: mol_type = other DNA
cacctaccaagcccgactcc

SEQ ID NO: 480 - DNA, 20 bp, synthetic construct
  source 1..20: mol_type = other DNA
ctcctggagtcgggcttggt

SEQ ID NO: 481 - DNA, 20 bp, synthetic construct
  source 1..20: mol_type = other DNA
gatgcttttctcctggagtc

SEQ ID NO: 482 - DNA, 20 bp, synthetic construct
  source 1..20: mol_type = other DNA
actgaccttcctaggtttga

SEQ ID NO: 483 - DNA, 20 bp, synthetic construct
  source 1..20: mol_type = other DNA
gcaggccatcaaacctagga

SEQ ID NO: 484 - DNA, 20 bp, synthetic construct
  source 1..20: mol_type = other DNA
ctcatccctgactatctgct

SEQ ID NO: 485 - DNA, 20 bp, synthetic construct
  source 1..20: mol_type = other DNA
gtgggccagtgggaaggttt

SEQ ID NO: 486 - DNA, 20 bp, synthetic construct
  source 1..20: mol_type = other DNA
agaatcgattgaacccaggc

SEQ ID NO: 487 - DNA, 20 bp, synthetic construct
  source 1..20: mol_type = other DNA
acgtcctctttatagggaat

SEQ ID NO: 488 - DNA, 20 bp, synthetic construct
  source 1..20: mol_type = other DNA
ctatttggcaatttatacaa

SEQ ID NO: 489 - DNA, 20 bp, synthetic construct
  source 1..20: mol_type = other DNA
caaaaatcagctgggctttg

SEQ ID NO: 490 - DNA, 20 bp, synthetic construct
  source 1..20: mol_type = other DNA
ggctgtgaggcagtttctga

SEQ ID NO: 491 - DNA, 20 bp, synthetic construct
  source 1..20: mol_type = other DNA
cgtacaaaaggggccgggcg

SEQ ID NO: 492 - DNA, 20 bp, synthetic construct
  source 1..20: mol_type = other DNA
cttcttattttcaaatccaa

SEQ ID NO: 493 - DNA, 20 bp, synthetic construct
  source 1..20: mol_type = other DNA
cgttccgccggttgatggcc

SEQ ID NO: 494 - DNA, 20 bp, synthetic construct
  source 1..20: mol_type = other DNA
actactaccacattggtgac

SEQ ID NO: 495 - DNA, 20 bp, synthetic construct
  source 1..20: mol_type = other DNA
cacaaggggcttgaggaccc

SEQ ID NO: 496 - DNA, 20 bp, synthetic construct
  source 1..20: mol_type = other DNA
ttatagggaatgggctgagc

SEQ ID NO: 497 - DNA, 20 bp, synthetic construct
  source 1..20: mol_type = other DNA
ctttagcaggtagagtacct

SEQ ID NO: 498 - DNA, 20 bp, synthetic construct
  source 1..20: mol_type = other DNA
cctagacactgccgtgggtt

SEQ ID NO: 499 - DNA, 20 bp, synthetic construct
  source 1..20: mol_type = other DNA
gctgtggggctccaaaccca

SEQ ID NO: 500 - DNA, 20 bp, synthetic construct
  source 1..20: mol_type = other DNA
catagcgggtgagtaaccag

SEQ ID NO: 501 - DNA, 20 bp, synthetic construct
  source 1..20: mol_type = other DNA
ctcttagcctaggaagattc

SEQ ID NO: 502 - DNA, 20 bp, synthetic construct
  source 1..20: mol_type = other DNA
taaagaaattgccttcactt

SEQ ID NO: 503 - DNA, 20 bp, synthetic construct
  source 1..20: mol_type = other DNA
ttcatccaacgcctaagtga

SEQ ID NO: 504 - DNA, 20 bp, synthetic construct
  source 1..20: mol_type = other DNA
tggctggattctgactacac

SEQ ID NO: 505 - DNA, 20 bp, synthetic construct
  source 1..20: mol_type = other DNA
ctactaccacattggtgact

SEQ ID NO: 506 - DNA, 20 bp, synthetic construct
  source 1..20: mol_type = other DNA
tacttcgatgggctatgcag

SEQ ID NO: 507 - DNA, 20 bp, synthetic construct
  source 1..20: mol_type = other DNA
tgtccaggtgccatatttga

SEQ ID NO: 508 - DNA, 20 bp, synthetic construct
  source 1..20: mol_type = other DNA
tgcataaggcccatagacat

SEQ ID NO: 509 - DNA, 20 bp, synthetic construct
  source 1..20: mol_type = other DNA
gcccaggggctgggggaggg

SEQ ID NO: 510 - DNA, 20 bp, synthetic construct
  source 1..20: mol_type = other DNA
accttgcaacccatgaggaa

SEQ ID NO: 511 - DNA, 20 bp, synthetic construct
  source 1..20: mol_type = other DNA
attacgcgtggcaggggtgg

SEQ ID NO: 512 - DNA, 20 bp, synthetic construct
  source 1..20: mol_type = other DNA
tgtgtgtgttgggtgggagt

SEQ ID NO: 513 - DNA, 20 bp, synthetic construct
  source 1..20: mol_type = other DNA
atcataatacatctcagagg

SEQ ID NO: 514 - DNA, 20 bp, synthetic construct
  source 1..20: mol_type = other DNA
ctaccatcctatggccacca

SEQ ID NO: 515 - DNA, 20 bp, synthetic construct
  source 1..20: mol_type = other DNA
aacctctttggaaaactatt

SEQ ID NO: 516 - DNA, 20 bp, synthetic construct
  source 1..20: mol_type = other DNA
ccccttgtgagcagagagtg

SEQ ID NO: 517 - DNA, 20 bp, synthetic construct
  source 1..20: mol_type = other DNA
catgaaccttgagataagtg

SEQ ID NO: 518 - DNA, 20 bp, synthetic construct
  source 1..20: mol_type = other DNA
cagaaaaacttcacactgct

SEQ ID NO: 519 - DNA, 20 bp, synthetic construct
  source 1..20: mol_type = other DNA
ggcccatttcaggagagaaa

SEQ ID NO: 520 - DNA, 20 bp, synthetic construct
  source 1..20: mol_type = other DNA
ttaaagcactgatggggtgc

SEQ ID NO: 521 - DNA, 20 bp, synthetic construct
  source 1..20: mol_type = other DNA
gcatattctggaaaactttt

SEQ ID NO: 522 - DNA, 20 bp, synthetic construct
  source 1..20: mol_type = other DNA
ctggagcatccctctggccc

SEQ ID NO: 523 - DNA, 20 bp, synthetic construct
  source 1..20: mol_type = other DNA
ctcccccctcccccagcccc

SEQ ID NO: 524 - DNA, 20 bp, synthetic construct
  source 1..20: mol_type = other DNA
tcccccctcccccagcccct

SEQ ID NO: 525 - DNA, 20 bp, synthetic construct
  source 1..20: mol_type = other DNA
tccgtggttgcccaggggct

SEQ ID NO: 526 - DNA, 20 bp, synthetic construct
  source 1..20: mol_type = other DNA
atccgtggttgcccaggggc

SEQ ID NO: 527 - DNA, 20 bp, synthetic construct
  source 1..20: mol_type = other DNA
cgacaaaagacagattaatg

SEQ ID NO: 528 - DNA, 20 bp, synthetic construct
  source 1..20: mol_type = other DNA
aagattagactgaccttcct

SEQ ID NO: 529 - DNA, 20 bp, synthetic construct
  source 1..20: mol_type = other DNA
cttgctgaggaaagaggagg

SEQ ID NO: 530 - DNA, 20 bp, synthetic construct
  source 1..20: mol_type = other DNA
gcagagagagaaggaacgac

SEQ ID NO: 531 - DNA, 20 bp, synthetic construct
  source 1..20: mol_type = other DNA
ctctgctcacaaggggcttg

SEQ ID NO: 532 - DNA, 20 bp, synthetic construct
  source 1..20: mol_type = other DNA
gacaaaagacagattaatga

SEQ ID NO: 533 - DNA, 20 bp, synthetic construct
  source 1..20: mol_type = other DNA
aagtatgcaatgaatgtcaa

SEQ ID NO: 534 - DNA, 20 bp, synthetic construct
  source 1..20: mol_type = other DNA
ccccagcccctgggcaacca

SEQ ID NO: 535 - DNA, 20 bp, synthetic construct
  source 1..20: mol_type = other DNA
gtgttactattttaggcgac

SEQ ID NO: 536 - DNA, 20 bp, synthetic construct
  source 1..20: mol_type = other DNA
aaagcagagcatctacatcg

SEQ ID NO: 537 - DNA, 20 bp, synthetic construct
  source 1..20: mol_type = other DNA
gggtcttactcttgtcgccc

SEQ ID NO: 538 - DNA, 20 bp, synthetic construct
  source 1..20: mol_type = other DNA
taaaacttattaaataagta

SEQ ID NO: 539 - DNA, 20 bp, synthetic construct
  source 1..20: mol_type = other DNA
atctgtgggcaagaaaaagg

SEQ ID NO: 540 - DNA, 20 bp, synthetic construct
  source 1..20: mol_type = other DNA
gagtacctgggagagagggt

SEQ ID NO: 541 - DNA, 20 bp, synthetic construct
  source 1..20: mol_type = other DNA
cctcactctctgctcacaag

SEQ ID NO: 542 - DNA, 20 bp, synthetic construct
  source 1..20: mol_type = other DNA
agctgggaacctgaagacaa

SEQ ID NO: 543 - DNA, 20 bp, synthetic construct
  source 1..20: mol_type = other DNA
gcgggcagattacgcgtggc

SEQ ID NO: 544 - DNA, 20 bp, synthetic construct
  source 1..20: mol_type = other DNA
aacacaaggaagtagggaac

SEQ ID NO: 545 - DNA, 20 bp, synthetic construct
  source 1..20: mol_type = other DNA
ctcaccagacccaaatctgc

SEQ ID NO: 546 - DNA, 20 bp, synthetic construct
  source 1..20: mol_type = other DNA
gaagggagatgcttttctcc

SEQ ID NO: 547 - DNA, 20 bp, synthetic construct
  source 1..20: mol_type = other DNA
aaatggagttttggtggtgt

SEQ ID NO: 548 - DNA, 20 bp, synthetic construct
  source 1..20: mol_type = other DNA
tgaagcaggccatcaaacct

SEQ ID NO: 549 - DNA, 20 bp, synthetic construct
  source 1..20: mol_type = other DNA
aggtttgatggcctgcttca

SEQ ID NO: 550 - DNA, 20 bp, synthetic construct
  source 1..20: mol_type = other DNA
cacctcttcttccctgaagc

SEQ ID NO: 551 - DNA, 20 bp, synthetic construct
  source 1..20: mol_type = other DNA
acagtgccagatcctctttt

SEQ ID NO: 552 - DNA, 20 bp, synthetic construct
  source 1..20: mol_type = other DNA
ctgttcatcaagagatgcaa

SEQ ID NO: 553 - DNA, 20 bp, synthetic construct
  source 1..20: mol_type = other DNA
ggctgggggaggggggagac

SEQ ID NO: 554 - DNA, 20 bp, synthetic construct
  source 1..20: mol_type = other DNA
ataatctgtgggcaagaaaa

SEQ ID NO: 555 - DNA, 20 bp, synthetic construct
  source 1..20: mol_type = other DNA
ttattattatatgcatcata

SEQ ID NO: 556 - DNA, 20 bp, synthetic construct
  source 1..20: mol_type = other DNA
taaacctatttttatagaga

SEQ ID NO: 557 - DNA, 20 bp, synthetic construct
  source 1..20: mol_type = other DNA
atctgctggcaccttgatcg

SEQ ID NO: 558 - DNA, 20 bp, synthetic construct
  source 1..20: mol_type = other DNA
ttgtttctatggccagcttc

SEQ ID NO: 559 - DNA, 20 bp, synthetic construct
  source 1..20: mol_type = other DNA
gaggtgagtgcagtcatccg

SEQ ID NO: 560 - DNA, 20 bp, synthetic construct
  source 1..20: mol_type = other DNA
aaaagcagagcatctacatc

SEQ ID NO: 561 - DNA, 20 bp, synthetic construct
  source 1..20: mol_type = other DNA
caagctagtgatactggagg

SEQ ID NO: 562 - DNA, 20 bp, synthetic construct
  source 1..20: mol_type = other DNA
aggatagagctgccatttgc

SEQ ID NO: 563 - DNA, 20 bp, synthetic construct
  source 1..20: mol_type = other DNA
agattacgcgtggcaggggt

SEQ ID NO: 564 - DNA, 20 bp, synthetic construct
  source 1..20: mol_type = other DNA
aggtgagtgcagtcatccga

SEQ ID NO: 565 - DNA, 20 bp, synthetic construct
  source 1..20: mol_type = other DNA
cctagagtggtggaagctaa

SEQ ID NO: 566 - DNA, 20 bp, synthetic construct
  source 1..20: mol_type = other DNA
cgatagacgccggcagcccc

SEQ ID NO: 567 - DNA, 20 bp, synthetic construct
  source 1..20: mol_type = other DNA
ccccgctgctcaaacctctg

SEQ ID NO: 568 - DNA, 20 bp, synthetic construct
  source 1..20: mol_type = other DNA
acttttcctcacttatctca

SEQ ID NO: 569 - DNA, 20 bp, synthetic construct
  source 1..20: mol_type = other DNA
aatcagctgggctttgtggc

SEQ ID NO: 570 - DNA, 20 bp, synthetic construct
  source 1..20: mol_type = other DNA
gccagtcccagcttctcttg

SEQ ID NO: 571 - DNA, 20 bp, synthetic construct
  source 1..20: mol_type = other DNA
aggggggagacagggagaat

SEQ ID NO: 572 - DNA, 20 bp, synthetic construct
  source 1..20: mol_type = other DNA
gtgtgtgtgttgggtgggag

SEQ ID NO: 573 - DNA, 20 bp, synthetic construct
  source 1..20: mol_type = other DNA
gggaggatcatgagagttgg

SEQ ID NO: 574 - DNA, 20 bp, synthetic construct
  source 1..20: mol_type = other DNA
aagtgtccttcaaggggtca

SEQ ID NO: 575 - DNA, 20 bp, synthetic construct
  source 1..20: mol_type = other DNA
taccatcctatggccaccag

SEQ ID NO: 576 - DNA, 20 bp, synthetic construct
  source 1..20: mol_type = other DNA
cctaccatcctatggccacc

SEQ ID NO: 577 - DNA, 20 bp, synthetic construct
  source 1..20: mol_type = other DNA
ccagctaccatgggaggctg

SEQ ID NO: 578 - DNA, 20 bp, synthetic construct
  source 1..20: mol_type = other DNA
ctgattcttccgatacccca

SEQ ID NO: 579 - DNA, 20 bp, synthetic construct
  source 1..20: mol_type = other DNA
cgtggttgcccaggggctgg

SEQ ID NO: 580 - DNA, 20 bp, synthetic construct
  source 1..20: mol_type = other DNA
gaggatagagctgccatttg

SEQ ID NO: 581 - DNA, 20 bp, synthetic construct
  source 1..20: mol_type = other DNA
agtctgaggctggggcaact

SEQ ID NO: 582 - DNA, 20 bp, synthetic construct
  source 1..20: mol_type = other DNA
agatgcttttctcctggagt

SEQ ID NO: 583 - DNA, 20 bp, synthetic construct
  source 1..20: mol_type = other DNA
cccatggtgagtacttcgat

SEQ ID NO: 584 - DNA, 20 bp, synthetic construct
  source 1..20: mol_type = other DNA
caacaattaatgagaaagta

SEQ ID NO: 585 - DNA, 20 bp, synthetic construct
  source 1..20: mol_type = other DNA
caatttgccctggatggtcc

SEQ ID NO: 586 - DNA, 20 bp, synthetic construct
  source 1..20: mol_type = other DNA
cgtaacatacccagtaccac

SEQ ID NO: 587 - DNA, 20 bp, synthetic construct
  source 1..20: mol_type = other DNA
tcttgctgaggaaagaggag

SEQ ID NO: 588 - DNA, 20 bp, synthetic construct
  source 1..20: mol_type = other DNA
ggtccacaacattgtaccag

SEQ ID NO: 589 - DNA, 20 bp, synthetic construct
  source 1..20: mol_type = other DNA
tcataatacatctcagaggt

SEQ ID NO: 590 - DNA, 20 bp, synthetic construct
  source 1..20: mol_type = other DNA
agggatgagctcttaaaaga

SEQ ID NO: 591 - DNA, 20 bp, synthetic construct
  source 1..20: mol_type = other DNA
cccagggtagggcacacagt

SEQ ID NO: 592 - DNA, 20 bp, synthetic construct
  source 1..20: mol_type = other DNA
tacagacaaatgctttctgc

SEQ ID NO: 593 - DNA, 20 bp, synthetic construct
  source 1..20: mol_type = other DNA
taaagcgcgcctttcctcat

SEQ ID NO: 594 - DNA, 20 bp, synthetic construct
  source 1..20: mol_type = other DNA
agtggcccttttggaccaag

SEQ ID NO: 595 - DNA, 20 bp, synthetic construct
  source 1..20: mol_type = other DNA
cctcactgagaaggtgatgt

SEQ ID NO: 596 - DNA, 20 bp, synthetic construct
  source 1..20: mol_type = other DNA
ggagaaaacacaaggaagta

SEQ ID NO: 597 - DNA, 20 bp, synthetic construct
  source 1..20: mol_type = other DNA
aagctagtgatactggaggg

SEQ ID NO: 598 - DNA, 20 bp, synthetic construct
  source 1..20: mol_type = other DNA
cgttgagaggagtgcgccgg

SEQ ID NO: 599 - DNA, 20 bp, synthetic construct
  source 1..20: mol_type = other DNA
tctgggaaatggagttttgg

SEQ ID NO: 600 - DNA, 20 bp, synthetic construct
  source 1..20: mol_type = other DNA
ttgcccaggggctgggggag

SEQ ID NO: 601 - DNA, 20 bp, synthetic construct
  source 1..20: mol_type = other DNA
ggggcgaatgtttacagctg

SEQ ID NO: 602 - DNA, 20 bp, synthetic construct
  source 1..20: mol_type = other DNA
tcaaaatgtctgggaaggcc

SEQ ID NO: 603 - DNA, 20 bp, synthetic construct
  source 1..20: mol_type = other DNA
tggcccatttcaggagagaa

SEQ ID NO: 604 - DNA, 20 bp, synthetic construct
  source 1..20: mol_type = other DNA
ttctcagtatttggaaagac

SEQ ID NO: 605 - DNA, 20 bp, synthetic construct
  source 1..20: mol_type = other DNA
gggtggggaggtcacagaac

SEQ ID NO: 606 - DNA, 20 bp, synthetic construct
  source 1..20: mol_type = other DNA
ttctggacagttcatttcaa

SEQ ID NO: 607 - DNA, 20 bp, synthetic construct
  source 1..20: mol_type = other DNA
agaaagaaggaaattgcttc

SEQ ID NO: 608 - DNA, 20 bp, synthetic construct
  source 1..20: mol_type = other DNA
gcaaggtggtctaacctctt

SEQ ID NO: 609 - DNA, 20 bp, synthetic construct
  source 1..20: mol_type = other DNA
ttccgccggttgatggcctg

SEQ ID NO: 610 - DNA, 20 bp, synthetic construct
  source 1..20: mol_type = other DNA
gcccatggtgagtacttcga

SEQ ID NO: 611 - DNA, 20 bp, synthetic construct
  source 1..20: mol_type = other DNA
ggggcaaacattgtgtatga

SEQ ID NO: 612 - DNA, 20 bp, synthetic construct
  source 1..20: mol_type = other DNA
taagtatatttacagatttg

SEQ ID NO: 613 - DNA, 20 bp, synthetic construct
  source 1..20: mol_type = other DNA
ccgtggttgcccaggggctg

SEQ ID NO: 614 - DNA, 20 bp, synthetic construct
  source 1..20: mol_type = other DNA
aatctgcccgcagatcctgt

SEQ ID NO: 615 - DNA, 20 bp, synthetic construct
  source 1..20: mol_type = other DNA
acacaaggaagtagggaaca

SEQ ID NO: 616 - DNA, 20 bp, synthetic construct
  source 1..20: mol_type = other DNA
gccaggctgtcggagaagag

SEQ ID NO: 617 - DNA, 20 bp, synthetic construct
  source 1..20: mol_type = other DNA
ttaatgtagcaaagtggaca

SEQ ID NO: 618 - DNA, 20 bp, synthetic construct
  source 1..20: mol_type = other DNA
tgcaacgtgggccagtggga

SEQ ID NO: 619 - DNA, 20 bp, synthetic construct
  source 1..20: mol_type = other DNA
agctccccaaaccttcccac

SEQ ID NO: 620 - DNA, 20 bp, synthetic construct
  source 1..20: mol_type = other DNA
agagtggcccttttggacca

SEQ ID NO: 621 - DNA, 20 bp, synthetic construct
  source 1..20: mol_type = other DNA
actacattaatgtagcaaag

SEQ ID NO: 622 - DNA, 20 bp, synthetic construct
  source 1..20: mol_type = other DNA
tgactagtcccatgtggtat

SEQ ID NO: 623 - DNA, 20 bp, synthetic construct
  source 1..20: mol_type = other DNA
gatgctattaataattctgt

SEQ ID NO: 624 - DNA, 20 bp, synthetic construct
  source 1..20: mol_type = other DNA
ctgcctcgggctccaccccc

SEQ ID NO: 625 - DNA, 20 bp, synthetic construct
  source 1..20: mol_type = other DNA
ggttgatggcctggggctgc

SEQ ID NO: 626 - DNA, 20 bp, synthetic construct
  source 1..20: mol_type = other DNA
tagtaagatgtggggccttt

SEQ ID NO: 627 - DNA, 20 bp, synthetic construct
  source 1..20: mol_type = other DNA
caactcctgaatagcacatt

SEQ ID NO: 628 - DNA, 20 bp, synthetic construct
  source 1..20: mol_type = other DNA
cgttaatccatatttaaact

SEQ ID NO: 629 - DNA, 20 bp, synthetic construct
  source 1..20: mol_type = other DNA
gctgggggaggggggagaca

SEQ ID NO: 630 - DNA, 20 bp, synthetic construct
  source 1..20: mol_type = other DNA
agaaggtttcagcgaagaca

SEQ ID NO: 631 - DNA, 20 bp, synthetic construct
  source 1..20: mol_type = other DNA
gaaacggaagtctgaggctg

SEQ ID NO: 632 - DNA, 20 bp, synthetic construct
  source 1..20: mol_type = other DNA
tctacgggaagatatcctgt

SEQ ID NO: 633 - DNA, 20 bp, synthetic construct
  source 1..20: mol_type = other DNA
gaaaaaaaaaaaaacaagtc

SEQ ID NO: 634 - DNA, 20 bp, synthetic construct
  source 1..20: mol_type = other DNA
agaaaaacttcacactgcta

SEQ ID NO: 635 - DNA, 20 bp, synthetic construct
  source 1..20: mol_type = other DNA
ttcttgctgaggaaagagga

SEQ ID NO: 636 - DNA, 20 bp, synthetic construct
  source 1..20: mol_type = other DNA
caggaattggctctgaaagc

SEQ ID NO: 637 - DNA, 20 bp, synthetic construct
  source 1..20: mol_type = other DNA
caaaagcagagcatctacat

SEQ ID NO: 638 - DNA, 20 bp, synthetic construct
  source 1..20: mol_type = other DNA
cccgctgctcaaacctctgg

SEQ ID NO: 639 - DNA, 20 bp, synthetic construct
  source 1..20: mol_type = other DNA
cacacttgccgtggccagcc

SEQ ID NO: 640 - DNA, 20 bp, synthetic construct
  source 1..20: mol_type = other DNA
acctatttttatagagatgg

SEQ ID NO: 641 - DNA, 20 bp, synthetic construct
  source 1..20: mol_type = other DNA
aggagggagggggcaggagc

SEQ ID NO: 642 - DNA, 20 bp, synthetic construct
  source 1..20: mol_type = other DNA
gtcgatccgtggttgcccag

SEQ ID NO: 643 - DNA, 20 bp, synthetic construct
  source 1..20: mol_type = other DNA
caagtggctggacgtgcaga

SEQ ID NO: 644 - DNA, 20 bp, synthetic construct
  source 1..20: mol_type = other DNA
ggatttctcttctttgtgat

SEQ ID NO: 645 - DNA, 20 bp, synthetic construct
  source 1..20: mol_type = other DNA
gcaattagggtctagttggc

SEQ ID NO: 646 - DNA, 20 bp, synthetic construct
  source 1..20: mol_type = other DNA
ggggggagacagggagaatg

SEQ ID NO: 647 - DNA, 20 bp, synthetic construct
  source 1..20: mol_type = other DNA
agagggtggggcctcaaagc

SEQ ID NO: 648 - DNA, 20 bp, synthetic construct
  source 1..20: mol_type = other DNA
ccatcccactgcctgctttg

SEQ ID NO: 649 - DNA, 20 bp, synthetic construct
  source 1..20: mol_type = other DNA
aagcaggcagtgggatggag

SEQ ID NO: 650 - DNA, 20 bp, synthetic construct
  source 1..20: mol_type = other DNA
ccccagaggtttgagcagcg

SEQ ID NO: 651 - DNA, 20 bp, synthetic construct
  source 1..20: mol_type = other DNA
cagggcatgcaagggaggtg

SEQ ID NO: 652 - DNA, 20 bp, synthetic construct
  source 1..20: mol_type = other DNA
ttttgttcgttatagaattt

SEQ ID NO: 653 - DNA, 20 bp, synthetic construct
  source 1..20: mol_type = other DNA
aaatatgattggaggatcaa

SEQ ID NO: 654 - DNA, 20 bp, synthetic construct
  source 1..20: mol_type = other DNA
ctgctggtttaaagcactga

SEQ ID NO: 655 - DNA, 20 bp, synthetic construct
  source 1..20: mol_type = other DNA
gattttcttgctgaggaaag

SEQ ID NO: 656 - DNA, 20 bp, synthetic construct
  source 1..20: mol_type = other DNA
catttgtctgtagacagcct

SEQ ID NO: 657 - DNA, 20 bp, synthetic construct
  source 1..20: mol_type = other DNA
atccgagggagagaagatgc

SEQ ID NO: 658 - DNA, 20 bp, synthetic construct
  source 1..20: mol_type = other DNA
ccaacattgcggtgtgaaga

SEQ ID NO: 659 - DNA, 20 bp, synthetic construct
  source 1..20: mol_type = other DNA
gtagtaagatgtggggcctt

SEQ ID NO: 660 - DNA, 20 bp, synthetic construct
  source 1..20: mol_type = other DNA
tcaactcctgaatagcacat

SEQ ID NO: 661 - DNA, 20 bp, synthetic construct
  source 1..20: mol_type = other DNA
agaaaataaattaaaaagca

SEQ ID NO: 662 - DNA, 20 bp, synthetic construct
  source 1..20: mol_type = other DNA
ccaaaggcaaggggtgttgg

SEQ ID NO: 663 - DNA, 20 bp, synthetic construct
  source 1..20: mol_type = other DNA
ttgatgttgacctaactgac

SEQ ID NO: 664 - DNA, 20 bp, synthetic construct
  source 1..20: mol_type = other DNA
ccttccgcccgccccgcaaa

SEQ ID NO: 665 - DNA, 20 bp, synthetic construct
  source 1..20: mol_type = other DNA
gctgccatttgcggggcggg

SEQ ID NO: 666 - DNA, 20 bp, synthetic construct
  source 1..20: mol_type = other DNA
ggatagagctgccatttgcg

SEQ ID NO: 667 - DNA, 20 bp, synthetic construct
  source 1..20: mol_type = other DNA
agcgaggaacatcacacact

SEQ ID NO: 668 - DNA, 20 bp, synthetic construct
  source 1..20: mol_type = other DNA
aatatgattggaggatcaaa

SEQ ID NO: 669 - DNA, 20 bp, synthetic construct
  source 1..20: mol_type = other DNA
attgaacccaggcgggcgga

SEQ ID NO: 670 - DNA, 20 bp, synthetic construct
  source 1..20: mol_type = other DNA
aagtctgaggctggggcaac

SEQ ID NO: 671 - DNA, 20 bp, synthetic construct
  source 1..20: mol_type = other DNA
gattacgcgtggcaggggtg

SEQ ID NO: 672 - DNA, 20 bp, synthetic construct
  source 1..20: mol_type = other DNA
taatctgcccgcagatcctg

SEQ ID NO: 673 - DNA, 20 bp, synthetic construct
  source 1..20: mol_type = other DNA
atagatagtatggaaaatta

SEQ ID NO: 674 - DNA, 20 bp, synthetic construct
  source 1..20: mol_type = other DNA
tggagaggagagaaagcccc

SEQ ID NO: 675 - DNA, 20 bp, synthetic construct
  source 1..20: mol_type = other DNA
agaggagagaaagcccctgg

SEQ ID NO: 676 - DNA, 20 bp, synthetic construct
  source 1..20: mol_type = other DNA
gggctatgcaggggctgcag

SEQ ID NO: 677 - DNA, 20 bp, synthetic construct
  source 1..20: mol_type = other DNA
ccagggcaaattggggtgta

SEQ ID NO: 678 - DNA, 20 bp, synthetic construct
  source 1..20: mol_type = other DNA
cgtgggccagtgggaaggtt

SEQ ID NO: 679 - DNA, 20 bp, synthetic construct
  source 1..20: mol_type = other DNA
ttggtgattaaatcattgtg

SEQ ID NO: 680 - DNA, 20 bp, synthetic construct
  source 1..20: mol_type = other DNA
tgtctcttgctagctcaaag

SEQ ID NO: 681 - DNA, 20 bp, synthetic construct
  source 1..20: mol_type = other DNA
gggcaagctagtgatactgg

SEQ ID NO: 682 - DNA, 20 bp, synthetic construct
  source 1..20: mol_type = other DNA
cttcaattaggaaaaaataa

SEQ ID NO: 683 - DNA, 20 bp, synthetic construct
  source 1..20: mol_type = other DNA
tagaaaataaattaaaaagc

SEQ ID NO: 684 - DNA, 20 bp, synthetic construct
  source 1..20: mol_type = other DNA
acctactgtgtgccctaccc

SEQ ID NO: 685 - DNA, 20 bp, synthetic construct
  source 1..20: mol_type = other DNA
gagtggcccttttggaccaa

SEQ ID NO: 686 - DNA, 20 bp, synthetic construct
  source 1..20: mol_type = other DNA
ataataaagtgtccttcaag

SEQ ID NO: 687 - DNA, 20 bp, synthetic construct
  source 1..20: mol_type = other DNA
ctccaccgtcaatagcattc

SEQ ID NO: 688 - DNA, 20 bp, synthetic construct
  source 1..20: mol_type = other DNA
atgttgctggtgggggtgca

SEQ ID NO: 689 - DNA, 20 bp, synthetic construct
  source 1..20: mol_type = other DNA
gtacttcgatgggctatgca

SEQ ID NO: 690 - DNA, 20 bp, synthetic construct
  source 1..20: mol_type = other DNA
ccccagccatgcacaaagat

SEQ ID NO: 691 - DNA, 20 bp, synthetic construct
  source 1..20: mol_type = other DNA
agtacctgggagagagggtg

SEQ ID NO: 692 - DNA, 20 bp, synthetic construct
  source 1..20: mol_type = other DNA
gttttgataggcacaggatg

SEQ ID NO: 693 - DNA, 20 bp, synthetic construct
  source 1..20: mol_type = other DNA
tctgtaacacacgcctgctg

SEQ ID NO: 694 - DNA, 20 bp, synthetic construct
  source 1..20: mol_type = other DNA
aatagcaaagtggttaaagg

SEQ ID NO: 695 - DNA, 20 bp, synthetic construct
  source 1..20: mol_type = other DNA
tatcatcagaaaagaaagaa

SEQ ID NO: 696 - DNA, 20 bp, synthetic construct
  source 1..20: mol_type = other DNA
gaatttaaattaattaaaat

SEQ ID NO: 697 - DNA, 20 bp, synthetic construct
  source 1..20: mol_type = other DNA
catatattagcagaaactga

SEQ ID NO: 698 - DNA, 20 bp, synthetic construct
  source 1..20: mol_type = other DNA
ggtggggaggtcacagaaca

SEQ ID NO: 699 - DNA, 20 bp, synthetic construct
  source 1..20: mol_type = other DNA
acaaatgctttctgcgggag

SEQ ID NO: 700 - DNA, 20 bp, synthetic construct
  source 1..20: mol_type = other DNA
agggcctcgtgggccatgtg

SEQ ID NO: 701 - DNA, 20 bp, synthetic construct
  source 1..20: mol_type = other DNA
cctgcgcaaaacgctttggc

SEQ ID NO: 702 - DNA, 20 bp, synthetic construct
  source 1..20: mol_type = other DNA
ccgctcccccaccccacgac

SEQ ID NO: 703 - DNA, 20 bp, synthetic construct
  source 1..20: mol_type = other DNA
taagtaccatatacataatg

SEQ ID NO: 704 - DNA, 20 bp, synthetic construct
  source 1..20: mol_type = other DNA
gtgtgttgggtgggagtggg

SEQ ID NO: 705 - DNA, 20 bp, synthetic construct
  source 1..20: mol_type = other DNA
aagaaaaaggtggactgaaa

SEQ ID NO: 706 - DNA, 20 bp, synthetic construct
  source 1..20: mol_type = other DNA
cgttttttaatggatccatg

SEQ ID NO: 707 - DNA, 20 bp, synthetic construct
  source 1..20: mol_type = other DNA
aatttgccctggatggtcct

SEQ ID NO: 708 - DNA, 20 bp, synthetic construct
  source 1..20: mol_type = other DNA
ggctggattctgactacact

SEQ ID NO: 709 - DNA, 20 bp, synthetic construct
  source 1..20: mol_type = other DNA
ctctcctgcgcaaaacgctt

SEQ ID NO: 710 - DNA, 20 bp, synthetic construct
  source 1..20: mol_type = other DNA
atctcggctcacaacaactt

SEQ ID NO: 711 - DNA, 20 bp, synthetic construct
  source 1..20: mol_type = other DNA
ttttgataggcacaggatgg

SEQ ID NO: 712 - DNA, 20 bp, synthetic construct
  source 1..20: mol_type = other DNA
aaagtggacagggcagggag

SEQ ID NO: 713 - DNA, 20 bp, synthetic construct
  source 1..20: mol_type = other DNA
aagaggtgaaaggaattcga

SEQ ID NO: 714 - DNA, 20 bp, synthetic construct
  source 1..20: mol_type = other DNA
agaccaaaggcaaggggtgt

SEQ ID NO: 715 - DNA, 20 bp, synthetic construct
  source 1..20: mol_type = other DNA
aaggttgcattggacactgc

SEQ ID NO: 716 - DNA, 20 bp, synthetic construct
  source 1..20: mol_type = other DNA
accacactgctgtctctcct

SEQ ID NO: 717 - DNA, 20 bp, synthetic construct
  source 1..20: mol_type = other DNA
aattaatatcgttgataaat

SEQ ID NO: 718 - DNA, 20 bp, synthetic construct
  source 1..20: mol_type = other DNA
atgctattaataattctgtt

SEQ ID NO: 719 - DNA, 20 bp, synthetic construct
  source 1..20: mol_type = other DNA
agggcaccatccagcctgtc

SEQ ID NO: 720 - DNA, 20 bp, synthetic construct
  source 1..20: mol_type = other DNA
tcataggctagtgtgtgtgt

SEQ ID NO: 721 - DNA, 20 bp, synthetic construct
  source 1..20: mol_type = other DNA
gaagatggaaggtcagtgtt

SEQ ID NO: 722 - DNA, 20 bp, synthetic construct
  source 1..20: mol_type = other DNA
ctgggggtggagcccgaggc

SEQ ID NO: 723 - DNA, 20 bp, synthetic construct
  source 1..20: mol_type = other DNA
ttctgtccctgtgagaaggc

SEQ ID NO: 724 - DNA, 20 bp, synthetic construct
  source 1..20: mol_type = other DNA
gtatgtcactgaagagagtc

SEQ ID NO: 725 - DNA, 20 bp, synthetic construct
  source 1..20: mol_type = other DNA
agtcgatccgtggttgccca

SEQ ID NO: 726 - DNA, 20 bp, synthetic construct
  source 1..20: mol_type = other DNA
cggcggaacgaggtggagtt

SEQ ID NO: 727 - DNA, 20 bp, synthetic construct
  source 1..20: mol_type = other DNA
ttgtttagaaattattttat

SEQ ID NO: 728 - DNA, 20 bp, synthetic construct
  source 1..20: mol_type = other DNA
gaggagaaattctgagcaga

SEQ ID NO: 729 - DNA, 20 bp, synthetic construct
  source 1..20: mol_type = other DNA
aaacattgtgtatgacggcg

SEQ ID NO: 730 - DNA, 20 bp, synthetic construct
  source 1..20: mol_type = other DNA
tggagaaaacacaaggaagt

SEQ ID NO: 731 - DNA, 20 bp, synthetic construct
  source 1..20: mol_type = other DNA
tgaagatggaaggtcagtgt

SEQ ID NO: 732 - DNA, 20 bp, synthetic construct
  source 1..20: mol_type = other DNA
tttaaaaatattgggtgtgg

SEQ ID NO: 733 - DNA, 20 bp, synthetic construct
  source 1..20: mol_type = other DNA
tagaaggctcctcacagaac

SEQ ID NO: 734 - DNA, 20 bp, synthetic construct
  source 1..20: mol_type = other DNA
ggtgtaacccaggaccatcc

SEQ ID NO: 735 - DNA, 20 bp, synthetic construct
  source 1..20: mol_type = other DNA
tttcttgctgaggaaagagg

SEQ ID NO: 736 - DNA, 20 bp, synthetic construct
  source 1..20: mol_type = other DNA
tctcttctttgtgattggca

SEQ ID NO: 737 - DNA, 20 bp, synthetic construct
  source 1..20: mol_type = other DNA
aatcgtctgattgctggaga

SEQ ID NO: 738 - DNA, 20 bp, synthetic construct
  source 1..20: mol_type = other DNA
cattgcggtgtgaagatgga

SEQ ID NO: 739 - DNA, 20 bp, synthetic construct
  source 1..20: mol_type = other DNA
tgtcgtggggtgggggagcg

SEQ ID NO: 740 - DNA, 20 bp, synthetic construct
  source 1..20: mol_type = other DNA
gcaagctagtgatactggag

SEQ ID NO: 741 - DNA, 20 bp, synthetic construct
  source 1..20: mol_type = other DNA
agttttgataggcacaggat

SEQ ID NO: 742 - DNA, 20 bp, synthetic construct
  source 1..20: mol_type = other DNA
tcaccatgggcatggtccag

SEQ ID NO: 743 - DNA, 20 bp, synthetic construct
  source 1..20: mol_type = other DNA
gggtacttgagaattgagag

SEQ ID NO: 744 - DNA, 20 bp, synthetic construct
  source 1..20: mol_type = other DNA
tttcactatttttcctttag

SEQ ID NO: 745 - DNA, 20 bp, synthetic construct
  source 1..20: mol_type = other DNA
ggaacagggactggtccttt

SEQ ID NO: 746 - DNA, 20 bp, synthetic construct
  source 1..20: mol_type = other DNA
tgtgttgggtgggagtgggt

SEQ ID NO: 747 - DNA, 20 bp, synthetic construct
  source 1..20: mol_type = other DNA
acaagcggctagatgtcgag

SEQ ID NO: 748 - DNA, 20 bp, synthetic construct
  source 1..20: mol_type = other DNA
gtgagtaaccagtggaacaa

SEQ ID NO: 749 - DNA, 20 bp, synthetic construct
  source 1..20: mol_type = other DNA
ttcatccagatgttagaaat

SEQ ID NO: 750 - DNA, 20 bp, synthetic construct
  source 1..20: mol_type = other DNA
cgtctgattgctggagaggg

SEQ ID NO: 751 - DNA, 20 bp, synthetic construct
  source 1..20: mol_type = other DNA
gaggggggagacagggagaa

SEQ ID NO: 752 - DNA, 20 bp, synthetic construct
  source 1..20: mol_type = other DNA
tcctgcgcaaaacgctttgg

SEQ ID NO: 753 - DNA, 20 bp, synthetic construct
  source 1..20: mol_type = other DNA
agtttaccaatctttgtgca

SEQ ID NO: 754 - DNA, 20 bp, synthetic construct
  source 1..20: mol_type = other DNA
gcatccctctggcccagggt

SEQ ID NO: 755 - DNA, 20 bp, synthetic construct
  source 1..20: mol_type = other DNA
gtgttgggtgggagtgggtg

SEQ ID NO: 756 - DNA, 20 bp, synthetic construct
  source 1..20: mol_type = other DNA
gaggccccaccctctctccc

SEQ ID NO: 757 - DNA, 20 bp, synthetic construct
  source 1..20: mol_type = other DNA
tctatcgtgcgctcttccgc

SEQ ID NO: 758 - DNA, 20 bp, synthetic construct
  source 1..20: mol_type = other DNA
tcattaattgttgcaactta

SEQ ID NO: 759 - DNA, 20 bp, synthetic construct
  source 1..20: mol_type = other DNA
ccaatccaagagactaaact

SEQ ID NO: 760 - DNA, 20 bp, synthetic construct
  source 1..20: mol_type = other DNA
gaacagggactggtcctttt

SEQ ID NO: 761 - DNA, 20 bp, synthetic construct
  source 1..20: mol_type = other DNA
gagacaagtctctctttagc

SEQ ID NO: 762 - DNA, 20 bp, synthetic construct
  source 1..20: mol_type = other DNA
ggtgagtaaccagtggaaca

SEQ ID NO: 763 - DNA, 20 bp, synthetic construct
  source 1..20: mol_type = other DNA
tgaccctttctctcctgaaa

SEQ ID NO: 764 - DNA, 20 bp, synthetic construct
  source 1..20: mol_type = other DNA
tgagaaagtatggcatattc

SEQ ID NO: 765 - DNA, 20 bp, synthetic construct
  source 1..20: mol_type = other DNA
atttgtctgtagacagcctg

SEQ ID NO: 766 - DNA, 20 bp, synthetic construct
  source 1..20: mol_type = other DNA
aagggggagcccagacaggc

SEQ ID NO: 767 - DNA, 20 bp, synthetic construct
  source 1..20: mol_type = other DNA
ctgaggctggggcaactggg

SEQ ID NO: 768 - DNA, 20 bp, synthetic construct
  source 1..20: mol_type = other DNA
gacggaggcaagagacagtc

SEQ ID NO: 769 - DNA, 20 bp, synthetic construct
  source 1..20: mol_type = other DNA
aagggctgtttttgtttcta

SEQ ID NO: 770 - DNA, 20 bp, synthetic construct
  source 1..20: mol_type = other DNA
gaacaacagttgtctttgtg

SEQ ID NO: 771 - DNA, 20 bp, synthetic construct
  source 1..20: mol_type = other DNA
aatccaacagaaaacaggat

SEQ ID NO: 772 - DNA, 20 bp, synthetic construct
  source 1..20: mol_type = other DNA
ctgactcaattataagacat

SEQ ID NO: 773 - DNA, 20 bp, synthetic construct
  source 1..20: mol_type = other DNA
ccatgggaaggaacgctcta

SEQ ID NO: 774 - DNA, 20 bp, synthetic construct
  source 1..20: mol_type = other DNA
cgcaggagagtggcggcatc

SEQ ID NO: 775 - DNA, 20 bp, synthetic construct
  source 1..20: mol_type = other DNA
ggcaagctagtgatactgga

SEQ ID NO: 776 - DNA, 20 bp, synthetic construct
  source 1..20: mol_type = other DNA
tttagtttgccgtctgtagg

SEQ ID NO: 777 - DNA, 20 bp, synthetic construct
  source 1..20: mol_type = other DNA
atggagttttggtggtgtag

SEQ ID NO: 778 - DNA, 20 bp, synthetic construct
  source 1..20: mol_type = other DNA
tgtagcaaagtggacagggc

SEQ ID NO: 779 - DNA, 20 bp, synthetic construct
  source 1..20: mol_type = other DNA
aaataatgattatctttttt

SEQ ID NO: 780 - DNA, 20 bp, synthetic construct
  source 1..20: mol_type = other DNA
gaccctttctctcctgaaat

SEQ ID NO: 781 - DNA, 20 bp, synthetic construct
  source 1..20: mol_type = other DNA
gtgaaagaaacggaagtctg

SEQ ID NO: 782 - DNA, 20 bp, synthetic construct
  source 1..20: mol_type = other DNA
gggtgggggtgtgaaagaaa

SEQ ID NO: 783 - DNA, 20 bp, synthetic construct
  source 1..20: mol_type = other DNA
gcatcataggggtgtggaaa

SEQ ID NO: 784 - DNA, 20 bp, synthetic construct
  source 1..20: mol_type = other DNA
atctgtgtaaaagagactcc

SEQ ID NO: 785 - DNA, 20 bp, synthetic construct
  source 1..20: mol_type = other DNA
ggctatgcaggggctgcagt

SEQ ID NO: 786 - DNA, 20 bp, synthetic construct
  source 1..20: mol_type = other DNA
aagtctgggaaatggagttt

SEQ ID NO: 787 - DNA, 20 bp, synthetic construct
  source 1..20: mol_type = other DNA
ggaattcgatggcccatttc

SEQ ID NO: 788 - DNA, 20 bp, synthetic construct
  source 1..20: mol_type = other DNA
ttatcttacttgcttaacgc

SEQ ID NO: 789 - DNA, 20 bp, synthetic construct
  source 1..20: mol_type = other DNA
gctgtgaggcagtttctgaa

SEQ ID NO: 790 - DNA, 20 bp, synthetic construct
  source 1..20: mol_type = other DNA
cggatgtctcatgtaacatg

SEQ ID NO: 791 - DNA, 20 bp, synthetic construct
  source 1..20: mol_type = other DNA
gggcaccatccagcctgtct

SEQ ID NO: 792 - DNA, 20 bp, synthetic construct
  source 1..20: mol_type = other DNA
ttatatgcatcataggggtg

SEQ ID NO: 793 - DNA, 20 bp, synthetic construct
  source 1..20: mol_type = other DNA
ctaccatcaaatatggcacc

SEQ ID NO: 794 - DNA, 20 bp, synthetic construct
  source 1..20: mol_type = other DNA
ttattgtatttcttgtagag

SEQ ID NO: 795 - DNA, 20 bp, synthetic construct
  source 1..20: mol_type = other DNA
tgccccctagcagatagtca

SEQ ID NO: 796 - DNA, 20 bp, synthetic construct
  source 1..20: mol_type = other DNA
tttctgcgggaggggagtct

SEQ ID NO: 797 - DNA, 20 bp, synthetic construct
  source 1..20: mol_type = other DNA
tggcgggtccctgttgccag

SEQ ID NO: 798 - DNA, 20 bp, synthetic construct
  source 1..20: mol_type = other DNA
tttgttcaaaatgtctggga

SEQ ID NO: 799 - DNA, 20 bp, synthetic construct
  source 1..20: mol_type = other DNA
tggctgggggctgctagtcc

SEQ ID NO: 800 - DNA, 20 bp, synthetic construct
  source 1..20: mol_type = other DNA
ccagctcgatttcaacactg

SEQ ID NO: 801 - DNA, 20 bp, synthetic construct
  source 1..20: mol_type = other DNA
caaactccacctcgttccgc

SEQ ID NO: 802 - DNA, 20 bp, synthetic construct
  source 1..20: mol_type = other DNA
tctgtgtaaaagagactcca

SEQ ID NO: 803 - DNA, 20 bp, synthetic construct
  source 1..20: mol_type = other DNA
gtgtaacccaggaccatcca

SEQ ID NO: 804 - DNA, 20 bp, synthetic construct
  source 1..20: mol_type = other DNA
taaattaaaaagcagggaga

SEQ ID NO: 805 - DNA, 20 bp, synthetic construct
  source 1..20: mol_type = other DNA
gctcttaaaagaagggacca

SEQ ID NO: 806 - DNA, 20 bp, synthetic construct
  source 1..20: mol_type = other DNA
tgtgccctaccctgggccag

SEQ ID NO: 807 - DNA, 20 bp, synthetic construct
  source 1..20: mol_type = other DNA
attataagacataggaagcc

SEQ ID NO: 808 - DNA, 20 bp, synthetic construct
  source 1..20: mol_type = other DNA
aatgaatttgagacgcctag

SEQ ID NO: 809 - DNA, 20 bp, synthetic construct
  source 1..20: mol_type = other DNA
aaacacttggagacagagcg

SEQ ID NO: 810 - DNA, 20 bp, synthetic construct
  source 1..20: mol_type = other DNA
gtctgcccaatgtgctattc

SEQ ID NO: 811 - DNA, 20 bp, synthetic construct
  source 1..20: mol_type = other DNA
tcatccctgactatctgcta

SEQ ID NO: 812 - DNA, 20 bp, synthetic construct
  source 1..20: mol_type = other DNA
agataagaaatagagaaaag

SEQ ID NO: 813 - DNA, 20 bp, synthetic construct
  source 1..20: mol_type = other DNA
aagaagttggctgggtgcag

SEQ ID NO: 814 - DNA, 20 bp, synthetic construct
  source 1..20: mol_type = other DNA
gcaaacattgtgtatgacgg

SEQ ID NO: 815 - DNA, 20 bp, synthetic construct
  source 1..20: mol_type = other DNA
ggcccacgttgcagggcacc

SEQ ID NO: 816 - DNA, 20 bp, synthetic construct
  source 1..20: mol_type = other DNA
acctagagtccaaggaagag

SEQ ID NO: 817 - DNA, 20 bp, synthetic construct
  source 1..20: mol_type = other DNA
gtctagaactacatgccaca

SEQ ID NO: 818 - DNA, 20 bp, synthetic construct
  source 1..20: mol_type = other DNA
ttttctcctggagtcgggct

SEQ ID NO: 819 - DNA, 20 bp, synthetic construct
  source 1..20: mol_type = other DNA
attccttccctccgggtata

SEQ ID NO: 820 - DNA, 20 bp, synthetic construct
  source 1..20: mol_type = other DNA
caaacattgtgtatgacggc

SEQ ID NO: 821 - DNA, 20 bp, synthetic construct
  source 1..20: mol_type = other DNA
ctttcataaccaaatccact

SEQ ID NO: 822 - DNA, 20 bp, synthetic construct
  source 1..20: mol_type = other DNA
tgtcacagcaggaaatttca

SEQ ID NO: 823 - DNA, 20 bp, synthetic construct
  source 1..20: mol_type = other DNA
cctcagctcaccatttgctc

SEQ ID NO: 824 - DNA, 20 bp, synthetic construct
  source 1..20: mol_type = other DNA
ggtgggaggatcatgagagt

SEQ ID NO: 825 - DNA, 20 bp, synthetic construct
  source 1..20: mol_type = other DNA
ggactcagcccctggcaaca

SEQ ID NO: 826 - DNA, 20 bp, synthetic construct
  source 1..20: mol_type = other DNA
tggggcctcaaagcaggcag

SEQ ID NO: 827 - DNA, 20 bp, synthetic construct
  source 1..20: mol_type = other DNA
cgtggggtgggggagcgggg

SEQ ID NO: 828 - DNA, 20 bp, synthetic construct
  source 1..20: mol_type = other DNA
ttctatggccagcttcagga

SEQ ID NO: 829 - DNA, 20 bp, synthetic construct
  source 1..20: mol_type = other DNA
agtaagatattttaatacga

SEQ ID NO: 830 - DNA, 20 bp, synthetic construct
  source 1..20: mol_type = other DNA
actgaaaaggccagagcaaa

SEQ ID NO: 831 - DNA, 20 bp, synthetic construct
  source 1..20: mol_type = other DNA
ctggtggccataggatggta

SEQ ID NO: 832 - DNA, 20 bp, synthetic construct
  source 1..20: mol_type = other DNA
gagaaaagaggccaggtgca

SEQ ID NO: 833 - DNA, 20 bp, synthetic construct
  source 1..20: mol_type = other DNA
tcttttagtttgccgtctgt

SEQ ID NO: 834 - DNA, 20 bp, synthetic construct
  source 1..20: mol_type = other DNA
tggtacttatactttgattg

SEQ ID NO: 835 - DNA, 20 bp, synthetic construct
  source 1..20: mol_type = other DNA
ctttctgcgggaggggagtc

SEQ ID NO: 836 - DNA, 20 bp, synthetic construct
  source 1..20: mol_type = other DNA
taatgaatttgagacgccta

SEQ ID NO: 837 - DNA, 20 bp, synthetic construct
  source 1..20: mol_type = other DNA
tcactgcctcagcagcgtgg

SEQ ID NO: 838 - DNA, 20 bp, synthetic construct
  source 1..20: mol_type = other DNA
aaaaaaagtggttgcagaac

SEQ ID NO: 839 - DNA, 20 bp, synthetic construct
  source 1..20: mol_type = other DNA
tctgggaaggccgggtgtgg

SEQ ID NO: 840 - DNA, 20 bp, synthetic construct
  source 1..20: mol_type = other DNA
ccagccaaaaatagccagtg

SEQ ID NO: 841 - DNA, 20 bp, synthetic construct
  source 1..20: mol_type = other DNA
ccacactggctatttttggc

SEQ ID NO: 842 - DNA, 20 bp, synthetic construct
  source 1..20: mol_type = other DNA
caattagggtctagttggct

SEQ ID NO: 843 - DNA, 20 bp, synthetic construct
  source 1..20: mol_type = other DNA
tgccagctcgatttcaacac

SEQ ID NO: 844 - DNA, 20 bp, synthetic construct
  source 1..20: mol_type = other DNA
gagctagcaagagacatcta

SEQ ID NO: 845 - DNA, 20 bp, synthetic construct
  source 1..20: mol_type = other DNA
actttttttgtgtccactgt

SEQ ID NO: 846 - DNA, 20 bp, synthetic construct
  source 1..20: mol_type = other DNA
ttaaatagcaaagtggttaa

SEQ ID NO: 847 - DNA, 20 bp, synthetic construct
  source 1..20: mol_type = other DNA
tgaggaaagaggagggggca

SEQ ID NO: 848 - DNA, 20 bp, synthetic construct
  source 1..20: mol_type = other DNA
ggggcctcaaagcaggcagt

SEQ ID NO: 849 - DNA, 20 bp, synthetic construct
  source 1..20: mol_type = other DNA
atagcaaagtggttaaagga

SEQ ID NO: 850 - DNA, 20 bp, synthetic construct
  source 1..20: mol_type = other DNA
attgtatttcttgtagagag

SEQ ID NO: 851 - DNA, 20 bp, synthetic construct
  source 1..20: mol_type = other DNA
agggcttccctaagcccaaa

SEQ ID NO: 852 - DNA, 20 bp, synthetic construct
  source 1..20: mol_type = other DNA
caggctgtcggagaagagtg

SEQ ID NO: 853 - DNA, 20 bp, synthetic construct
  source 1..20: mol_type = other DNA
ttcaaaatgtctgggaaggc

SEQ ID NO: 854 - DNA, 20 bp, synthetic construct
  source 1..20: mol_type = other DNA
tgatgttgacctaactgaca

SEQ ID NO: 855 - DNA, 20 bp, synthetic construct
  source 1..20: mol_type = other DNA
aatctaagattggtgactgg

SEQ ID NO: 856 - DNA, 20 bp, synthetic construct
  source 1..20: mol_type = other DNA
ccatttgcggggcgggcgga

SEQ ID NO: 857 - DNA, 20 bp, synthetic construct
  source 1..20: mol_type = other DNA
agtacttcgatgggctatgc

SEQ ID NO: 858 - DNA, 20 bp, synthetic construct
  source 1..20: mol_type = other DNA
ggttgttagactcagcactg

SEQ ID NO: 859 - DNA, 20 bp, synthetic construct
  source 1..20: mol_type = other DNA
cctctcgtgaaagagaaaga

SEQ ID NO: 860 - DNA, 20 bp, synthetic construct
  source 1..20: mol_type = other DNA
aggtagagtacctgggagag

SEQ ID NO: 861 - DNA, 20 bp, synthetic construct
  source 1..20: mol_type = other DNA
agctagcaagagacatctac

SEQ ID NO: 862 - DNA, 20 bp, synthetic construct
  source 1..20: mol_type = other DNA
gacagcagtgtggtggctgc

SEQ ID NO: 863 - DNA, 20 bp, synthetic construct
  source 1..20: mol_type = other DNA
tgagacaggccgatcacttg

SEQ ID NO: 864 - DNA, 20 bp, synthetic construct
  source 1..20: mol_type = other DNA
tgactactttaagatgcttt

SEQ ID NO: 865 - DNA, 20 bp, synthetic construct
  source 1..20: mol_type = other DNA
ttgccccctagcagatagtc

SEQ ID NO: 866 - DNA, 20 bp, synthetic construct
  source 1..20: mol_type = other DNA
aacgtcctctttatagggaa

SEQ ID NO: 867 - DNA, 20 bp, synthetic construct
  source 1..20: mol_type = other DNA
ctcagtttccttgtgtgtcc

SEQ ID NO: 868 - DNA, 20 bp, synthetic construct
  source 1..20: mol_type = other DNA
ttcctttcaagtgctgttaa

SEQ ID NO: 869 - DNA, 20 bp, synthetic construct
  source 1..20: mol_type = other DNA
caaaactccaagaccctagc

SEQ ID NO: 870 - DNA, 20 bp, synthetic construct
  source 1..20: mol_type = other DNA
ccaggctgtcggagaagagt

SEQ ID NO: 871 - DNA, 20 bp, synthetic construct
  source 1..20: mol_type = other DNA
gggtggccctgaatcttcct

SEQ ID NO: 872 - DNA, 20 bp, synthetic construct
  source 1..20: mol_type = other DNA
agcctcactctctgctcaca

SEQ ID NO: 873 - DNA, 20 bp, synthetic construct
  source 1..20: mol_type = other DNA
tatttccattttttacactc

SEQ ID NO: 874 - DNA, 20 bp, synthetic construct
  source 1..20: mol_type = other DNA
tttttgttattacttctctt

SEQ ID NO: 875 - DNA, 20 bp, synthetic construct
  source 1..20: mol_type = other DNA
gatggctttccagttctgtg

SEQ ID NO: 876 - DNA, 20 bp, synthetic construct
  source 1..20: mol_type = other DNA
ttcttcgcatcgcgggggtg

SEQ ID NO: 877 - DNA, 20 bp, synthetic construct
  source 1..20: mol_type = other DNA
acgatgttctctgctcttcg

SEQ ID NO: 878 - DNA, 20 bp, synthetic construct
  source 1..20: mol_type = other DNA
cttcatctgtttccatggga

SEQ ID NO: 879 - DNA, 20 bp, synthetic construct
  source 1..20: mol_type = other DNA
tcaacactggggtgtcccct

SEQ ID NO: 880 - DNA, 20 bp, synthetic construct
  source 1..20: mol_type = other DNA
gggtctatgctatgttaccc

SEQ ID NO: 881 - DNA, 20 bp, synthetic construct
  source 1..20: mol_type = other DNA
agagtacctgggagagaggg

SEQ ID NO: 882 - DNA, 20 bp, synthetic construct
  source 1..20: mol_type = other DNA
aggagccttctaaagttcaa

SEQ ID NO: 883 - DNA, 20 bp, synthetic construct
  source 1..20: mol_type = other DNA
gcttcaattaggaaaaaata

SEQ ID NO: 884 - DNA, 20 bp, synthetic construct
  source 1..20: mol_type = other DNA
ataaatctaagattggtgac

SEQ ID NO: 885 - DNA, 20 bp, synthetic construct
  source 1..20: mol_type = other DNA
actcaagggggagcccagac

SEQ ID NO: 886 - DNA, 20 bp, synthetic construct
  source 1..20: mol_type = other DNA
gtggaacttgaggatagacg

SEQ ID NO: 887 - DNA, 20 bp, synthetic construct
  source 1..20: mol_type = other DNA
gtagcaaagtggacagggca

SEQ ID NO: 888 - DNA, 20 bp, synthetic construct
  source 1..20: mol_type = other DNA
aggagaaattctgagcagat

SEQ ID NO: 889 - DNA, 20 bp, synthetic construct
  source 1..20: mol_type = other DNA
aataataaagtgtccttcaa

SEQ ID NO: 890 - DNA, 20 bp, synthetic construct
  source 1..20: mol_type = other DNA
ttggcgggtccctgttgcca

SEQ ID NO: 891 - DNA, 20 bp, synthetic construct
  source 1..20: mol_type = other DNA
aacagttgtctttgtgtgga

SEQ ID NO: 892 - DNA, 20 bp, synthetic construct
  source 1..20: mol_type = other DNA
ctacagacaaatgctttctg

SEQ ID NO: 893 - DNA, 20 bp, synthetic construct
  source 1..20: mol_type = other DNA
tgtaggcttggcgctatact

SEQ ID NO: 894 - DNA, 20 bp, synthetic construct
  source 1..20: mol_type = other DNA
ttgtggcacagtgagggaac

SEQ ID NO: 895 - DNA, 20 bp, synthetic construct
  source 1..20: mol_type = other DNA
cttaaagtagtcagagttac

SEQ ID NO: 896 - DNA, 20 bp, synthetic construct
  source 1..20: mol_type = other DNA
cttgtagtcccagctaccat

SEQ ID NO: 897 - DNA, 20 bp, synthetic construct
  source 1..20: mol_type = other DNA
gagcgaggaacatcacacac

SEQ ID NO: 898 - DNA, 20 bp, synthetic construct
  source 1..20: mol_type = other DNA
ctccagggagctagtgaaac

SEQ ID NO: 899 - DNA, 20 bp, synthetic construct
  source 1..20: mol_type = other DNA
ctcctgtttctcaagcagat

SEQ ID NO: 900 - DNA, 20 bp, synthetic construct
  source 1..20: mol_type = other DNA
ggcgcgctttagatacacac

SEQ ID NO: 901 - DNA, 20 bp, synthetic construct
  source 1..20: mol_type = other DNA
cataggctagtgtgtgtgtt

SEQ ID NO: 902 - DNA, 20 bp, synthetic construct
  source 1..20: mol_type = other DNA
tagaactacatgccacaggg

SEQ ID NO: 903 - DNA, 20 bp, synthetic construct
  source 1..20: mol_type = other DNA
catctcagggcatgcaaggg

SEQ ID NO: 904 - DNA, 20 bp, synthetic construct
  source 1..20: mol_type = other DNA
cggaatgctattgacggtgg

SEQ ID NO: 905 - DNA, 20 bp, synthetic construct
  source 1..20: mol_type = other DNA
ttcgcatcgcgggggtgggg

SEQ ID NO: 906 - DNA, 20 bp, synthetic construct
  source 1..20: mol_type = other DNA
atcagcaattagggtctagt

SEQ ID NO: 907 - DNA, 20 bp, synthetic construct
  source 1..20: mol_type = other DNA
atttgcggggcgggcggaag

SEQ ID NO: 908 - DNA, 20 bp, synthetic construct
  source 1..20: mol_type = other DNA
ggtggaagctaaaggaagat

SEQ ID NO: 909 - DNA, 20 bp, synthetic construct
  source 1..20: mol_type = other DNA
acttcttcgcatcgcggggg

SEQ ID NO: 910 - DNA, 20 bp, synthetic construct
  source 1..20: mol_type = other DNA
ctcctcattacagtgaaata

SEQ ID NO: 911 - DNA, 20 bp, synthetic construct
  source 1..20: mol_type = other DNA
ggagaaaagcatctcccttc

SEQ ID NO: 912 - DNA, 20 bp, synthetic construct
  source 1..20: mol_type = other DNA
tggtgattaaatcattgtgt

SEQ ID NO: 913 - DNA, 20 bp, synthetic construct
  source 1..20: mol_type = other DNA
ttttataattgtgatgataa

SEQ ID NO: 914 - DNA, 20 bp, synthetic construct
  source 1..20: mol_type = other DNA
atttaaattccaataccaca

SEQ ID NO: 915 - DNA, 20 bp, synthetic construct
  source 1..20: mol_type = other DNA
tgattgtgtcctctgtcccc

SEQ ID NO: 916 - DNA, 20 bp, synthetic construct
  source 1..20: mol_type = other DNA
ataatgaatttgagacgcct

SEQ ID NO: 917 - DNA, 20 bp, synthetic construct
  source 1..20: mol_type = other DNA
tgagaaacataaatcccgag

SEQ ID NO: 918 - DNA, 20 bp, synthetic construct
  source 1..20: mol_type = other DNA
gtgccctaccctgggccaga

SEQ ID NO: 919 - DNA, 20 bp, synthetic construct
  source 1..20: mol_type = other DNA
tgaaatgaactgtccagaac

SEQ ID NO: 920 - DNA, 20 bp, synthetic construct
  source 1..20: mol_type = other DNA
ccatagagcgttccttccca

SEQ ID NO: 921 - DNA, 20 bp, synthetic construct
  source 1..20: mol_type = other DNA
atgtctcatgtaacatgtgg

SEQ ID NO: 922 - DNA, 20 bp, synthetic construct
  source 1..20: mol_type = other DNA
tattattatatgcatcatag

SEQ ID NO: 923 - DNA, 20 bp, synthetic construct
  source 1..20: mol_type = other DNA
agagaaaagaggccaggtgc

SEQ ID NO: 924 - DNA, 20 bp, synthetic construct
  source 1..20: mol_type = other DNA
agcaatgtttactgggtggg

SEQ ID NO: 925 - DNA, 20 bp, synthetic construct
  source 1..20: mol_type = other DNA
cagtgttgggaagagtccat

SEQ ID NO: 926 - DNA, 20 bp, synthetic construct
  source 1..20: mol_type = other DNA
tgggacgacaggtgtaaccc

SEQ ID NO: 927 - DNA, 20 bp, synthetic construct
  source 1..20: mol_type = other DNA
ttcaaagattgagagggaat

SEQ ID NO: 928 - DNA, 20 bp, synthetic construct
  source 1..20: mol_type = other DNA
gggccagagggatgctccag

SEQ ID NO: 929 - DNA, 20 bp, synthetic construct
  source 1..20: mol_type = other DNA
catttgcggggcgggcggaa

SEQ ID NO: 930 - DNA, 20 bp, synthetic construct
  source 1..20: mol_type = other DNA
cactgctagggttaaatgaa

SEQ ID NO: 931 - DNA, 20 bp, synthetic construct
  source 1..20: mol_type = other DNA
aatacacatagaaaaatgac

SEQ ID NO: 932 - DNA, 20 bp, synthetic construct
  source 1..20: mol_type = other DNA
agacccatcctgttttctgt

SEQ ID NO: 933 - DNA, 20 bp, synthetic construct
  source 1..20: mol_type = other DNA
ctatgctatgttacccaggc

SEQ ID NO: 934 - DNA, 20 bp, synthetic construct
  source 1..20: mol_type = other DNA
ttgctggtgggggtgcaagg

SEQ ID NO: 935 - DNA, 20 bp, synthetic construct
  source 1..20: mol_type = other DNA
cactggttactcacccgcta

SEQ ID NO: 936 - DNA, 20 bp, synthetic construct
  source 1..20: mol_type = other DNA
caccacactgctgtctctcc

SEQ ID NO: 937 - DNA, 20 bp, synthetic construct
  source 1..20: mol_type = other DNA
gggactagtcatgactacat

SEQ ID NO: 938 - DNA, 20 bp, synthetic construct
  source 1..20: mol_type = other DNA
ttattagattccagtggtac

SEQ ID NO: 939 - DNA, 20 bp, synthetic construct
  source 1..20: mol_type = other DNA
ctacttagaaatataccttg

SEQ ID NO: 940 - DNA, 20 bp, synthetic construct
  source 1..20: mol_type = other DNA
tcgaacaatagactttcaat

SEQ ID NO: 941 - DNA, 20 bp, synthetic construct
  source 1..20: mol_type = other DNA
gacagggagaatggggagcg

SEQ ID NO: 942 - DNA, 20 bp, synthetic construct
  source 1..20: mol_type = other DNA
ccaacatcaccttctcagtg

SEQ ID NO: 943 - DNA, 20 bp, synthetic construct
  source 1..20: mol_type = other DNA
cctcaaagcaggcagtggga

SEQ ID NO: 944 - DNA, 20 bp, synthetic construct
  source 1..20: mol_type = other DNA
atcggggtatgtttacacaa

SEQ ID NO: 945 - DNA, 20 bp, synthetic construct
  source 1..20: mol_type = other DNA
tttcgtacaatactggaggc

SEQ ID NO: 946 - DNA, 20 bp, synthetic construct
  source 1..20: mol_type = other DNA
ttcgcccctagacactgccg

SEQ ID NO: 947 - DNA, 20 bp, synthetic construct
  source 1..20: mol_type = other DNA
tgccctgagatggggacaag

SEQ ID NO: 948 - DNA, 20 bp, synthetic construct
  source 1..20: mol_type = other DNA
gggagctagtgaaacaggaa

SEQ ID NO: 949 - DNA, 20 bp, synthetic construct
  source 1..20: mol_type = other DNA
aatcttaaatcatctaattg

SEQ ID NO: 950 - DNA, 20 bp, synthetic construct
  source 1..20: mol_type = other DNA
aaatccaacagaaaacagga

SEQ ID NO: 951 - DNA, 20 bp, synthetic construct
  source 1..20: mol_type = other DNA
atgtaaaccagttgtctgtt

SEQ ID NO: 952 - DNA, 20 bp, synthetic construct
  source 1..20: mol_type = other DNA
accaaatccacttggctcaa

SEQ ID NO: 953 - DNA, 20 bp, synthetic construct
  source 1..20: mol_type = other DNA
atcgaacaatagactttcaa

SEQ ID NO: 954 - DNA, 20 bp, synthetic construct
  source 1..20: mol_type = other DNA
aggctagtgtgtgtgttggg

SEQ ID NO: 955 - DNA, 20 bp, synthetic construct
  source 1..20: mol_type = other DNA
gggactcagcccctggcaac

SEQ ID NO: 956 - DNA, 20 bp, synthetic construct
  source 1..20: mol_type = other DNA
tttggcgggtccctgttgcc

SEQ ID NO: 957 - DNA, 20 bp, synthetic construct
  source 1..20: mol_type = other DNA
ttagctgagcgtggcagcgc

SEQ ID NO: 958 - DNA, 20 bp, synthetic construct
  source 1..20: mol_type = other DNA
agtctagaactacatgccac

SEQ ID NO: 959 - DNA, 20 bp, synthetic construct
  source 1..20: mol_type = other DNA
tgtcgagaggagcacattgg

SEQ ID NO: 960 - DNA, 20 bp, synthetic construct
  source 1..20: mol_type = other DNA
tgtggtagtagtaagatgtg

SEQ ID NO: 961 - DNA, 20 bp, synthetic construct
  source 1..20: mol_type = other DNA
actgctagggttaaatgaaa

SEQ ID NO: 962 - DNA, 20 bp, synthetic construct
  source 1..20: mol_type = other DNA
aaaaaatcctaacagacaac

SEQ ID NO: 963 - DNA, 20 bp, synthetic construct
  source 1..20: mol_type = other DNA
tgtggcacagtgagggaact

SEQ ID NO: 964 - DNA, 20 bp, synthetic construct
  source 1..20: mol_type = other DNA
taattaaaattggccgggcg

SEQ ID NO: 965 - DNA, 20 bp, synthetic construct
  source 1..20: mol_type = other DNA
ccaaaccggaatgctattga

SEQ ID NO: 966 - DNA, 20 bp, synthetic construct
  source 1..20: mol_type = other DNA
tctatttcttatctcctgag

SEQ ID NO: 967 - DNA, 20 bp, synthetic construct
  source 1..20: mol_type = other DNA
tctgtccctgtgagaaggca

SEQ ID NO: 968 - DNA, 20 bp, synthetic construct
  source 1..20: mol_type = other DNA
ctcggcttcatctgtttcca

SEQ ID NO: 969 - DNA, 20 bp, synthetic construct
  source 1..20: mol_type = other DNA
gagagttggaggctgcagtg

SEQ ID NO: 970 - DNA, 20 bp, synthetic construct
  source 1..20: mol_type = other DNA
taaaagagaaaccttgggcc

SEQ ID NO: 971 - DNA, 20 bp, synthetic construct
  source 1..20: mol_type = other DNA
tattccttccctccgggtat

SEQ ID NO: 972 - DNA, 20 bp, synthetic construct
  source 1..20: mol_type = other DNA
ccaaggtatatttctaagta

SEQ ID NO: 973 - DNA, 20 bp, synthetic construct
  source 1..20: mol_type = other DNA
caaaaatagccagtgtggct

SEQ ID NO: 974 - DNA, 20 bp, synthetic construct
  source 1..20: mol_type = other DNA
acagggagaatggggagcga

SEQ ID NO: 975 - DNA, 20 bp, synthetic construct
  source 1..20: mol_type = other DNA
aatattgggtgtggtggcac

SEQ ID NO: 976 - DNA, 20 bp, synthetic construct
  source 1..20: mol_type = other DNA
ttcctgtttcactagctccc

SEQ ID NO: 977 - DNA, 20 bp, synthetic construct
  source 1..20: mol_type = other DNA
aagtaccatatacataatgt

SEQ ID NO: 978 - DNA, 20 bp, synthetic construct
  source 1..20: mol_type = other DNA
aaattatgaatgattaaaaa

SEQ ID NO: 979 - DNA, 20 bp, synthetic construct
  source 1..20: mol_type = other DNA
ttcgtacaatactggaggct

SEQ ID NO: 980 - DNA, 20 bp, synthetic construct
  source 1..20: mol_type = other DNA
ataaaagagaaaccttgggc

SEQ ID NO: 981 - DNA, 20 bp, synthetic construct
  source 1..20: mol_type = other DNA
tgttttttattagattccag

SEQ ID NO: 982 - DNA, 20 bp, synthetic construct
  source 1..20: mol_type = other DNA
cctacttagaaatatacctt

SEQ ID NO: 983 - DNA, 20 bp, synthetic construct
  source 1..20: mol_type = other DNA
gcagagaacatcgtctctcc

SEQ ID NO: 984 - DNA, 20 bp, synthetic construct
  source 1..20: mol_type = other DNA
tgtcccctggagcatccctc

SEQ ID NO: 985 - DNA, 20 bp, synthetic construct
  source 1..20: mol_type = other DNA
ctctaaagatttgccagttc

SEQ ID NO: 986 - DNA, 20 bp, synthetic construct
  source 1..20: mol_type = other DNA
ttctcaagcagattggaagc

SEQ ID NO: 987 - DNA, 20 bp, synthetic construct
  source 1..20: mol_type = other DNA
ggtagagtacctgggagaga

SEQ ID NO: 988 - DNA, 20 bp, synthetic construct
  source 1..20: mol_type = other DNA
ccagggatgaagcaggaagc

SEQ ID NO: 989 - DNA, 20 bp, synthetic construct
  source 1..20: mol_type = other DNA
ccaaacccacggcagtgtct

SEQ ID NO: 990 - DNA, 20 bp, synthetic construct
  source 1..20: mol_type = other DNA
caggagagacagcagtgtgg

SEQ ID NO: 991 - DNA, 20 bp, synthetic construct
  source 1..20: mol_type = other DNA
gcctcactctctgctcacaa

SEQ ID NO: 992 - DNA, 20 bp, synthetic construct
  source 1..20: mol_type = other DNA
gaaaaatgacaggaaatgac

SEQ ID NO: 993 - DNA, 20 bp, synthetic construct
  source 1..20: mol_type = other DNA
caagccacactggctatttt

SEQ ID NO: 994 - DNA, 20 bp, synthetic construct
  source 1..20: mol_type = other DNA
tcggatgactgcactcacct

SEQ ID NO: 995 - DNA, 20 bp, synthetic construct
  source 1..20: mol_type = other DNA
agtaggttgccaagccacac

SEQ ID NO: 996 - DNA, 20 bp, synthetic construct
  source 1..20: mol_type = other DNA
actctcttcagtgacataca

SEQ ID NO: 997 - DNA, 20 bp, synthetic construct
  source 1..20: mol_type = other DNA
aaaagggccactctgctgtg

SEQ ID NO: 998 - DNA, 20 bp, synthetic construct
  source 1..20: mol_type = other DNA
atgttggagcaaagattcga

SEQ ID NO: 999 - DNA, 20 bp, synthetic construct
  source 1..20: mol_type = other DNA
caacatcaccttctcagtga

SEQ ID NO: 1000 - DNA, 20 bp, synthetic construct
  source 1..20: mol_type = other DNA
taataataaagtgtccttca

SEQ ID NO: 1001 - DNA, 20 bp, synthetic construct
  source 1..20: mol_type = other DNA
aaaaaagtggttgcagaaca

SEQ ID NO: 1002 - DNA, 20 bp, synthetic construct
  source 1..20: mol_type = other DNA
aatggagttttggtggtgta

SEQ ID NO: 1003 - DNA, 20 bp, synthetic construct
  source 1..20: mol_type = other DNA
ttaaagtagtcagagttact

SEQ ID NO: 1004 - DNA, 20 bp, synthetic construct
  source 1..20: mol_type = other DNA
ggtctaattttaaaatgctt

SEQ ID NO: 1005 - DNA, 20 bp, synthetic construct
  source 1..20: mol_type = other DNA
taaatgagaaaagcataaca

SEQ ID NO: 1006 - DNA, 20 bp, synthetic construct
  source 1..20: mol_type = other DNA
aattagggtctagttggctg

SEQ ID NO: 1007 - DNA, 20 bp, synthetic construct
  source 1..20: mol_type = other DNA
gggagcgagggcttaatgtt

SEQ ID NO: 1008 - DNA, 20 bp, synthetic construct
  source 1..20: mol_type = other DNA
tgtctttcgcttagcatatg

SEQ ID NO: 1009 - DNA, 20 bp, synthetic construct
  source 1..20: mol_type = other DNA
ttggagcaaagattcgaagg

SEQ ID NO: 1010 - DNA, 20 bp, synthetic construct
  source 1..20: mol_type = other DNA
ttaacacaattagctgagcg

SEQ ID NO: 1011 - DNA, 20 bp, synthetic construct
  source 1..20: mol_type = other DNA
ttgtacgaaataaatttctg

SEQ ID NO: 1012 - DNA, 20 bp, synthetic construct
  source 1..20: mol_type = other DNA
gaaagcaggcctctcttcct

SEQ ID NO: 1013 - DNA, 20 bp, synthetic construct
  source 1..20: mol_type = other DNA
catgagatgcatccaccctg

SEQ ID NO: 1014 - DNA, 20 bp, synthetic construct
  source 1..20: mol_type = other DNA
tcagcactgtggaagaaaca

SEQ ID NO: 1015 - DNA, 20 bp, synthetic construct
  source 1..20: mol_type = other DNA
cttcttcgcatcgcgggggt

SEQ ID NO: 1016 - DNA, 20 bp, synthetic construct
  source 1..20: mol_type = other DNA
aaccagtggaacaagggccc

SEQ ID NO: 1017 - DNA, 20 bp, synthetic construct
  source 1..20: mol_type = other DNA
cttccctccgggtatagggc

SEQ ID NO: 1018 - DNA, 20 bp, synthetic construct
  source 1..20: mol_type = other DNA
atccctgactatctgctagg

SEQ ID NO: 1019 - DNA, 20 bp, synthetic construct
  source 1..20: mol_type = other DNA
tcggcttcatctgtttccat

SEQ ID NO: 1020 - DNA, 20 bp, synthetic construct
  source 1..20: mol_type = other DNA
aggcaaagaaattctatgga

SEQ ID NO: 1021 - DNA, 20 bp, synthetic construct
  source 1..20: mol_type = other DNA
cctggtggccataggatggt

SEQ ID NO: 1022 - DNA, 20 bp, synthetic construct
  source 1..20: mol_type = other DNA
cagcgcgtggtccctgcctc

SEQ ID NO: 1023 - DNA, 20 bp, synthetic construct
  source 1..20: mol_type = other DNA
tgggggtggagcccgaggca

SEQ ID NO: 1024 - DNA, 20 bp, synthetic construct
  source 1..20: mol_type = other DNA
gagaaaccttgggccgggca

SEQ ID NO: 1025 - DNA, 20 bp, synthetic construct
  source 1..20: mol_type = other DNA
ctgactactttaagatgctt

SEQ ID NO: 1026 - DNA, 20 bp, synthetic construct
  source 1..20: mol_type = other DNA
gatggatggcgaagccactc

SEQ ID NO: 1027 - DNA, 20 bp, synthetic construct
  source 1..20: mol_type = other DNA
gctttggtggtaaaaaatac

SEQ ID NO: 1028 - DNA, 20 bp, synthetic construct
  source 1..20: mol_type = other DNA
cccaaggtatatttctaagt

SEQ ID NO: 1029 - DNA, 20 bp, synthetic construct
  source 1..20: mol_type = other DNA
ggctagtgtgtgtgttgggt

SEQ ID NO: 1030 - DNA, 20 bp, synthetic construct
  source 1..20: mol_type = other DNA
cctcagcctcccatggtagc

SEQ ID NO: 1031 - DNA, 20 bp, synthetic construct
  source 1..20: mol_type = other DNA
gcagcgcgtggtccctgcct

SEQ ID NO: 1032 - DNA, 20 bp, synthetic construct
  source 1..20: mol_type = other DNA
tattagattccagtggtact

SEQ ID NO: 1033 - DNA, 20 bp, synthetic construct
  source 1..20: mol_type = other DNA
gaaaacctagtttagtctct

SEQ ID NO: 1034 - DNA, 20 bp, synthetic construct
  source 1..20: mol_type = other DNA
ctggagtcgggcttggtagg

SEQ ID NO: 1035 - DNA, 20 bp, synthetic construct
  source 1..20: mol_type = other DNA
attaattaaaattggccggg

SEQ ID NO: 1036 - DNA, 20 bp, synthetic construct
  source 1..20: mol_type = other DNA
agattcattcattcattcct

SEQ ID NO: 1037 - DNA, 20 bp, synthetic construct
  source 1..20: mol_type = other DNA
ttcacttaggcgttggatga

SEQ ID NO: 1038 - DNA, 20 bp, synthetic construct
  source 1..20: mol_type = other DNA
tttgaggcaaagaaattcta

SEQ ID NO: 1039 - DNA, 20 bp, synthetic construct
  source 1..20: mol_type = other DNA
gagacagtctggcacatttg

SEQ ID NO: 1040 - DNA, 20 bp, synthetic construct
  source 1..20: mol_type = other DNA
ctcagcctcccatggtagct

SEQ ID NO: 1041 - DNA, 20 bp, synthetic construct
  source 1..20: mol_type = other DNA
ctcccttgcatgccctgaga

SEQ ID NO: 1042 - DNA, 20 bp, synthetic construct
  source 1..20: mol_type = other DNA
ttaattaaaattggccgggc

SEQ ID NO: 1043 - DNA, 20 bp, synthetic construct
  source 1..20: mol_type = other DNA
tagtcatgactagtcccatg

SEQ ID NO: 1044 - DNA, 20 bp, synthetic construct
  source 1..20: mol_type = other DNA
tagtcacatttctcagtatt

SEQ ID NO: 1045 - DNA, 20 bp, synthetic construct
  source 1..20: mol_type = other DNA
tgaggagacactgccactga

SEQ ID NO: 1046 - DNA, 20 bp, synthetic construct
  source 1..20: mol_type = other DNA
ctgagcaaacctagagtcca

SEQ ID NO: 1047 - DNA, 20 bp, synthetic construct
  source 1..20: mol_type = other DNA
agcttcaggagggagggggc

SEQ ID NO: 1048 - DNA, 20 bp, synthetic construct
  source 1..20: mol_type = other DNA
aacgtttctatcatcgcaga

SEQ ID NO: 1049 - DNA, 20 bp, synthetic construct
  source 1..20: mol_type = other DNA
tgtatgacggcggggcgcgg

SEQ ID NO: 1050 - DNA, 20 bp, synthetic construct
  source 1..20: mol_type = other DNA
tgggccagagggatgctcca

SEQ ID NO: 1051 - DNA, 20 bp, synthetic construct
  source 1..20: mol_type = other DNA
attagggtctagttggctgg

SEQ ID NO: 1052 - DNA, 20 bp, synthetic construct
  source 1..20: mol_type = other DNA
agaaaaatgacaggaaatga

SEQ ID NO: 1053 - DNA, 20 bp, synthetic construct
  source 1..20: mol_type = other DNA
gtgtgatattccttccctcc

SEQ ID NO: 1054 - DNA, 20 bp, synthetic construct
  source 1..20: mol_type = other DNA
ttgtgtatgacggcggggcg

SEQ ID NO: 1055 - DNA, 20 bp, synthetic construct
  source 1..20: mol_type = other DNA
ccaatctttgtgcatggctg

SEQ ID NO: 1056 - DNA, 20 bp, synthetic construct
  source 1..20: mol_type = other DNA
tgcaaaggaaatcagcaatt

SEQ ID NO: 1057 - DNA, 20 bp, synthetic construct
  source 1..20: mol_type = other DNA
agaaagcccctggtggccat

SEQ ID NO: 1058 - DNA, 20 bp, synthetic construct
  source 1..20: mol_type = other DNA
gctattaaaaaggatgaggt

SEQ ID NO: 1059 - DNA, 20 bp, synthetic construct
  source 1..20: mol_type = other DNA
tatggccagcttcaggaggg

SEQ ID NO: 1060 - DNA, 20 bp, synthetic construct
  source 1..20: mol_type = other DNA
ttatcagtcattttttgtat

SEQ ID NO: 1061 - DNA, 20 bp, synthetic construct
  source 1..20: mol_type = other DNA
ccataggatggtagggattt

SEQ ID NO: 1062 - DNA, 20 bp, synthetic construct
  source 1..20: mol_type = other DNA
ccactgaaggacagaagcag

SEQ ID NO: 1063 - DNA, 20 bp, synthetic construct
  source 1..20: mol_type = other DNA
agggtttcctcacagcagag

SEQ ID NO: 1064 - DNA, 20 bp, synthetic construct
  source 1..20: mol_type = other DNA
gccagctcgatttcaacact

SEQ ID NO: 1065 - DNA, 20 bp, synthetic construct
  source 1..20: mol_type = other DNA
aagttccacaaagcctcaca

SEQ ID NO: 1066 - DNA, 20 bp, synthetic construct
  source 1..20: mol_type = other DNA
attatcagtcattttttgta

SEQ ID NO: 1067 - DNA, 20 bp, synthetic construct
  source 1..20: mol_type = other DNA
ctatctccatgaccccttga

SEQ ID NO: 1068 - DNA, 20 bp, synthetic construct
  source 1..20: mol_type = other DNA
gactactttaagatgctttg

SEQ ID NO: 1069 - DNA, 20 bp, synthetic construct
  source 1..20: mol_type = other DNA
gactggtccttttgggctta

SEQ ID NO: 1070 - DNA, 20 bp, synthetic construct
  source 1..20: mol_type = other DNA
atgtggtagtagtaagatgt

SEQ ID NO: 1071 - DNA, 20 bp, synthetic construct
  source 1..20: mol_type = other DNA
tacatggcctttgagccaag

SEQ ID NO: 1072 - DNA, 20 bp, synthetic construct
  source 1..20: mol_type = other DNA
catcaaccggcggaacgagg

SEQ ID NO: 1073 - DNA, 20 bp, synthetic construct
  source 1..20: mol_type = other DNA
ggactggtccttttgggctt

SEQ ID NO: 1074 - DNA, 20 bp, synthetic construct
  source 1..20: mol_type = other DNA
tggtgtatctgcttcagcat

SEQ ID NO: 1075 - DNA, 20 bp, synthetic construct
  source 1..20: mol_type = other DNA
aaatattgggtgtggtggca

SEQ ID NO: 1076 - DNA, 20 bp, synthetic construct
  source 1..20: mol_type = other DNA
gaaacataaatcccgagagg

SEQ ID NO: 1077 - DNA, 20 bp, synthetic construct
  source 1..20: mol_type = other DNA
ctacctcctgcccacctctc

SEQ ID NO: 1078 - DNA, 20 bp, synthetic construct
  source 1..20: mol_type = other DNA
agatgtcgagaggagcacat

SEQ ID NO: 1079 - DNA, 20 bp, synthetic construct
  source 1..20: mol_type = other DNA
ctctgtaacacacgcctgct

SEQ ID NO: 1080 - DNA, 20 bp, synthetic construct
  source 1..20: mol_type = other DNA
ctgggccagagggatgctcc

SEQ ID NO: 1081 - DNA, 20 bp, synthetic construct
  source 1..20: mol_type = other DNA
aaaataggtttaaaaatatt

SEQ ID NO: 1082 - DNA, 20 bp, synthetic construct
  source 1..20: mol_type = other DNA
aaaccttgggccgggcatgg

SEQ ID NO: 1083 - DNA, 20 bp, synthetic construct
  source 1..20: mol_type = other DNA
cagagcaaatggtgagctga

SEQ ID NO: 1084 - DNA, 20 bp, synthetic construct
  source 1..20: mol_type = other DNA
accttcattgctacttgaga

SEQ ID NO: 1085 - DNA, 20 bp, synthetic construct
  source 1..20: mol_type = other DNA
ctagtttagtctcttggatt

SEQ ID NO: 1086 - DNA, 20 bp, synthetic construct
  source 1..20: mol_type = other DNA
agtctggcacatttgtggct

SEQ ID NO: 1087 - DNA, 20 bp, synthetic construct
  source 1..20: mol_type = other DNA
acatatgagcatttccagtt

SEQ ID NO: 1088 - DNA, 20 bp, synthetic construct
  source 1..20: mol_type = other DNA
ccctacttagaaatatacct

SEQ ID NO: 1089 - DNA, 20 bp, synthetic construct
  source 1..20: mol_type = other DNA
atatggtacctcagaacccc

SEQ ID NO: 1090 - DNA, 20 bp, synthetic construct
  source 1..20: mol_type = other DNA
gaaacccttgttgtcacagc

SEQ ID NO: 1091 - DNA, 20 bp, synthetic construct
  source 1..20: mol_type = other DNA
tggtggaagctaaaggaaga

SEQ ID NO: 1092 - DNA, 20 bp, synthetic construct
  source 1..20: mol_type = other DNA
catatgagcatttccagttt

SEQ ID NO: 1093 - DNA, 20 bp, synthetic construct
  source 1..20: mol_type = other DNA
tcgcccctagacactgccgt

SEQ ID NO: 1094 - DNA, 20 bp, synthetic construct
  source 1..20: mol_type = other DNA
catccctgactatctgctag

SEQ ID NO: 1095 - DNA, 20 bp, synthetic construct
  source 1..20: mol_type = other DNA
gcaaaggaaatcagcaatta

SEQ ID NO: 1096 - DNA, 20 bp, synthetic construct
  source 1..20: mol_type = other DNA
ccagagcaaatggtgagctg

SEQ ID NO: 1097 - DNA, 20 bp, synthetic construct
  source 1..20: mol_type = other DNA
tttgttttgttcaaaatgtc

SEQ ID NO: 1098 - DNA, 20 bp, synthetic construct
  source 1..20: mol_type = other DNA
gtgtcctgccctatacccgg

SEQ ID NO: 1099 - DNA, 20 bp, synthetic construct
  source 1..20: mol_type = other DNA
gtagacagcctggggttctg

SEQ ID NO: 1100 - DNA, 20 bp, synthetic construct
  source 1..20: mol_type = other DNA
taattttatgcttttcttct

SEQ ID NO: 1101 - DNA, 20 bp, synthetic construct
  source 1..20: mol_type = other DNA
ccccagtgttgaaatcgagc

SEQ ID NO: 1102 - DNA, 20 bp, synthetic construct
  source 1..20: mol_type = other DNA
tggggtttgcagaatgacct

SEQ ID NO: 1103 - DNA, 20 bp, synthetic construct
  source 1..20: mol_type = other DNA
cctaaatccctaccatccta

SEQ ID NO: 1104 - DNA, 20 bp, synthetic construct
  source 1..20: mol_type = other DNA
caaacccacggcagtgtcta

SEQ ID NO: 1105 - DNA, 20 bp, synthetic construct
  source 1..20: mol_type = other DNA
cagtggaagtgttaagtggc

SEQ ID NO: 1106 - DNA, 20 bp, synthetic construct
  source 1..20: mol_type = other DNA
gtgatgataaaggctttgtg

SEQ ID NO: 1107 - DNA, 20 bp, synthetic construct
  source 1..20: mol_type = other DNA
tatgggtttctataatctgt

SEQ ID NO: 1108 - DNA, 20 bp, synthetic construct
  source 1..20: mol_type = other DNA
actgctgtggagaaaacaca

SEQ ID NO: 1109 - DNA, 20 bp, synthetic construct
  source 1..20: mol_type = other DNA
ccccatctcagggcatgcaa

SEQ ID NO: 1110 - DNA, 20 bp, synthetic construct
  source 1..20: mol_type = other DNA
aatgtggtagtagtaagatg

SEQ ID NO: 1111 - DNA, 20 bp, synthetic construct
  source 1..20: mol_type = other DNA
tattatttcaaagattgaga

SEQ ID NO: 1112 - DNA, 20 bp, synthetic construct
  source 1..20: mol_type = other DNA
atattatttcaaagattgag

SEQ ID NO: 1113 - DNA, 20 bp, synthetic construct
  source 1..20: mol_type = other DNA
aaacccacggcagtgtctag

SEQ ID NO: 1114 - DNA, 20 bp, synthetic construct
  source 1..20: mol_type = other DNA
agggatgctccaggggacag

SEQ ID NO: 1115 - DNA, 20 bp, synthetic construct
  source 1..20: mol_type = other DNA
cagaggtgggactcagcccc

SEQ ID NO: 1116 - DNA, 20 bp, synthetic construct
  source 1..20: mol_type = other DNA
agcaacatatgacacagttc

SEQ ID NO: 1117 - DNA, 20 bp, synthetic construct
  source 1..20: mol_type = other DNA
agtgaggcttccatttcaga

SEQ ID NO: 1118 - DNA, 20 bp, synthetic construct
  source 1..20: mol_type = other DNA
ttcagggaagaagaggtgaa

SEQ ID NO: 1119 - DNA, 20 bp, synthetic construct
  source 1..20: mol_type = other DNA
tttcaggagagaaagggtca

SEQ ID NO: 1120 - DNA, 20 bp, synthetic construct
  source 1..20: mol_type = other DNA
tccccatctcagggcatgca

SEQ ID NO: 1121 - DNA, 20 bp, synthetic construct
  source 1..20: mol_type = other DNA
agcccctggtggccatagga

SEQ ID NO: 1122 - DNA, 20 bp, synthetic construct
  source 1..20: mol_type = other DNA
gaatcgtctgattgctggag

SEQ ID NO: 1123 - DNA, 20 bp, synthetic construct
  source 1..20: mol_type = other DNA
aagacataggaagccaggtg

SEQ ID NO: 1124 - DNA, 20 bp, synthetic construct
  source 1..20: mol_type = other DNA
gcctctcttccttggactct

SEQ ID NO: 1125 - DNA, 20 bp, synthetic construct
  source 1..20: mol_type = other DNA
ggagcgagggcttaatgttt

SEQ ID NO: 1126 - DNA, 20 bp, synthetic construct
  source 1..20: mol_type = other DNA
acattgcataaatctaagat

SEQ ID NO: 1127 - DNA, 20 bp, synthetic construct
  source 1..20: mol_type = other DNA
gggagcccagacaggctgga

SEQ ID NO: 1128 - DNA, 20 bp, synthetic construct
  source 1..20: mol_type = other DNA
aaacataaatcccgagaggt

SEQ ID NO: 1129 - DNA, 20 bp, synthetic construct
  source 1..20: mol_type = other DNA
tctacctcctgcccacctct

SEQ ID NO: 1130 - DNA, 20 bp, synthetic construct
  source 1..20: mol_type = other DNA
ggccatcaaccggcggaacg

SEQ ID NO: 1131 - DNA, 20 bp, synthetic construct
  source 1..20: mol_type = other DNA
aggcgttgagaggagtgcgc

SEQ ID NO: 1132 - DNA, 20 bp, synthetic construct
  source 1..20: mol_type = other DNA
tgtcctgccctatacccgga

SEQ ID NO: 1133 - DNA, 20 bp, synthetic construct
  source 1..20: mol_type = other DNA
atgctttggtaaacatttct

SEQ ID NO: 1134 - DNA, 20 bp, synthetic construct
  source 1..20: mol_type = other DNA
gtgggccatgtgaggctttg

SEQ ID NO: 1135 - DNA, 20 bp, synthetic construct
  source 1..20: mol_type = other DNA
ggcgggataatcacttgagc

SEQ ID NO: 1136 - DNA, 20 bp, synthetic construct
  source 1..20: mol_type = other DNA
ctggtgacaatataattcca

SEQ ID NO: 1137 - DNA, 20 bp, synthetic construct
  source 1..20: mol_type = other DNA
ggccagcttcaggagggagg

SEQ ID NO: 1138 - DNA, 20 bp, synthetic construct
  source 1..20: mol_type = other DNA
taggactgggccttctgaaa

SEQ ID NO: 1139 - DNA, 20 bp, synthetic construct
  source 1..20: mol_type = other DNA
tcccttgcatgccctgagat

SEQ ID NO: 1140 - DNA, 20 bp, synthetic construct
  source 1..20: mol_type = other DNA
gtccccttgtccccatctca

SEQ ID NO: 1141 - DNA, 20 bp, synthetic construct
  source 1..20: mol_type = other DNA
tgtgtgatattccttccctc

SEQ ID NO: 1142 - DNA, 20 bp, synthetic construct
  source 1..20: mol_type = other DNA
ctgccctatacccggaggga

SEQ ID NO: 1143 - DNA, 20 bp, synthetic construct
  source 1..20: mol_type = other DNA
cttaaaatccaacagaaaac

SEQ ID NO: 1144 - DNA, 20 bp, synthetic construct
  source 1..20: mol_type = other DNA
acataggaagccaggtgcgg

SEQ ID NO: 1145 - DNA, 20 bp, synthetic construct
  source 1..20: mol_type = other DNA
gtggcagtggaagtgttaag

SEQ ID NO: 1146 - DNA, 20 bp, synthetic construct
  source 1..20: mol_type = other DNA
cccttgcatgccctgagatg

SEQ ID NO: 1147 - DNA, 20 bp, synthetic construct
  source 1..20: mol_type = other DNA
ggtccccttgtccccatctc

SEQ ID NO: 1148 - DNA, 20 bp, synthetic construct
  source 1..20: mol_type = other DNA
ataaatcccgagaggtgggc

SEQ ID NO: 1149 - DNA, 20 bp, synthetic construct
  source 1..20: mol_type = other DNA
tatgagcatttccagtttgg

SEQ ID NO: 1150 - DNA, 20 bp, synthetic construct
  source 1..20: mol_type = other DNA
tatttgtaatacccccaaac

SEQ ID NO: 1151 - DNA, 20 bp, synthetic construct
  source 1..20: mol_type = other DNA
gcccaggagagacagcagtg

SEQ ID NO: 1152 - DNA, 20 bp, synthetic construct
  source 1..20: mol_type = other DNA
tcactttttaaatagcaaag

SEQ ID NO: 1153 - DNA, 20 bp, synthetic construct
  source 1..20: mol_type = other DNA
tctgtgctctgcaaatgacc

SEQ ID NO: 1154 - DNA, 20 bp, synthetic construct
  source 1..20: mol_type = other DNA
aggtcattctgcaaacccca

SEQ ID NO: 1155 - DNA, 20 bp, synthetic construct
  source 1..20: mol_type = other DNA
taggtttgtctataatgtac

SEQ ID NO: 1156 - DNA, 20 bp, synthetic construct
  source 1..20: mol_type = other DNA
accttctcaagtagcaatga

SEQ ID NO: 1157 - DNA, 20 bp, synthetic construct
  source 1..20: mol_type = other DNA
gtatgggtttctataatctg

SEQ ID NO: 1158 - DNA, 20 bp, synthetic construct
  source 1..20: mol_type = other DNA
taccaatctttgtgcatggc

SEQ ID NO: 1159 - DNA, 20 bp, synthetic construct
  source 1..20: mol_type = other DNA
gacgtgcagaaggcgttgag

SEQ ID NO: 1160 - DNA, 20 bp, synthetic construct
  source 1..20: mol_type = other DNA
ctcacttatctcaaggttca

SEQ ID NO: 1161 - DNA, 20 bp, synthetic construct
  source 1..20: mol_type = other DNA
ttcaggagagaaagggtcaa

SEQ ID NO: 1162 - DNA, 20 bp, synthetic construct
  source 1..20: mol_type = other DNA
taggacttcttcgcatcgcg

SEQ ID NO: 1163 - DNA, 20 bp, synthetic construct
  source 1..20: mol_type = other DNA
ctgctcttcgtggacatttc

SEQ ID NO: 1164 - DNA, 20 bp, synthetic construct
  source 1..20: mol_type = other DNA
agaaatagagaaaagaggcc

SEQ ID NO: 1165 - DNA, 20 bp, synthetic construct
  source 1..20: mol_type = other DNA
actggttactcacccgctat

SEQ ID NO: 1166 - DNA, 20 bp, synthetic construct
  source 1..20: mol_type = other DNA
aggacttcttcgcatcgcgg

SEQ ID NO: 1167 - DNA, 20 bp, synthetic construct
  source 1..20: mol_type = other DNA
caacacgaatctgaacaaac

SEQ ID NO: 1168 - DNA, 20 bp, synthetic construct
  source 1..20: mol_type = other DNA
agaagtgatatgcttcaatt

SEQ ID NO: 1169 - DNA, 20 bp, synthetic construct
  source 1..20: mol_type = other DNA
gataatcacttgagctgggg

SEQ ID NO: 1170 - DNA, 20 bp, synthetic construct
  source 1..20: mol_type = other DNA
atatgagcatttccagtttg

SEQ ID NO: 1171 - DNA, 20 bp, synthetic construct
  source 1..20: mol_type = other DNA
cgggataatcacttgagctg

SEQ ID NO: 1172 - DNA, 20 bp, synthetic construct
  source 1..20: mol_type = other DNA
cgggagaatcgtctgattgc

SEQ ID NO: 1173 - DNA, 20 bp, synthetic construct
  source 1..20: mol_type = other DNA
tcaccaaaggagaagcaaca

SEQ ID NO: 1174 - DNA, 20 bp, synthetic construct
  source 1..20: mol_type = other DNA
ggggaggaggatgatctgtt

SEQ ID NO: 1175 - DNA, 20 bp, synthetic construct
  source 1..20: mol_type = other DNA
cgttggatgaaggttcattt

SEQ ID NO: 1176 - DNA, 20 bp, synthetic construct
  source 1..20: mol_type = other DNA
aggtcaattctgcccatagc

SEQ ID NO: 1177 - DNA, 20 bp, synthetic construct
  source 1..20: mol_type = other DNA
atggccagcttcaggaggga

SEQ ID NO: 1178 - DNA, 20 bp, synthetic construct
  source 1..20: mol_type = other DNA
aaatttatttcgtacaatac

SEQ ID NO: 1179 - DNA, 20 bp, synthetic construct
  source 1..20: mol_type = other DNA
gaagagcgcacgatagacgc

SEQ ID NO: 1180 - DNA, 20 bp, synthetic construct
  source 1..20: mol_type = other DNA
ccactgcttctgtccttcag

SEQ ID NO: 1181 - DNA, 20 bp, synthetic construct
  source 1..20: mol_type = other DNA
caaagaaattctatggacgg

SEQ ID NO: 1182 - DNA, 20 bp, synthetic construct
  source 1..20: mol_type = other DNA
aaggatgaggtcgggtgcag

SEQ ID NO: 1183 - DNA, 20 bp, synthetic construct
  source 1..20: mol_type = other DNA
gatcaaagggtatgatctaa

SEQ ID NO: 1184 - DNA, 20 bp, synthetic construct
  source 1..20: mol_type = other DNA
ttttgtgtccactgtaggct

SEQ ID NO: 1185 - DNA, 20 bp, synthetic construct
  source 1..20: mol_type = other DNA
agggaaggaatatcacacag

SEQ ID NO: 1186 - DNA, 20 bp, synthetic construct
  source 1..20: mol_type = other DNA
ctaggacttcttcgcatcgc

SEQ ID NO: 1187 - DNA, 20 bp, synthetic construct
  source 1..20: mol_type = other DNA
accaatctttgtgcatggct

SEQ ID NO: 1188 - DNA, 20 bp, synthetic construct
  source 1..20: mol_type = other DNA
ttggcgacaacatattgtaa

SEQ ID NO: 1189 - DNA, 20 bp, synthetic construct
  source 1..20: mol_type = other DNA
tggccagcttcaggagggag

SEQ ID NO: 1190 - DNA, 20 bp, synthetic construct
  source 1..20: mol_type = other DNA
gggaggaggatgatctgttt

SEQ ID NO: 1191 - DNA, 20 bp, synthetic construct
  source 1..20: mol_type = other DNA
tagggaagccctcactgaga

SEQ ID NO: 1192 - DNA, 20 bp, synthetic construct
  source 1..20: mol_type = other DNA
aaggtcaattctgcccatag

SEQ ID NO: 1193 - DNA, 20 bp, synthetic construct
  source 1..20: mol_type = other DNA
atctaattgtggcacagtga

SEQ ID NO: 1194 - DNA, 20 bp, synthetic construct
  source 1..20: mol_type = other DNA
tactggaggggggcagcgcg

SEQ ID NO: 1195 - DNA, 20 bp, synthetic construct
  source 1..20: mol_type = other DNA
catctaattgtggcacagtg

SEQ ID NO: 1196 - DNA, 20 bp, synthetic construct
  source 1..20: mol_type = other DNA
gctctgaagcacttgaaatg

SEQ ID NO: 1197 - DNA, 20 bp, synthetic construct
  source 1..20: mol_type = other DNA
ctatgtcttataattgagtc

SEQ ID NO: 1198 - DNA, 20 bp, synthetic construct
  source 1..20: mol_type = other DNA
tttatttcgtacaatactgg

SEQ ID NO: 1199 - DNA, 20 bp, synthetic construct
  source 1..20: mol_type = other DNA
aatcccgagaggtgggcagg

SEQ ID NO: 1200 - DNA, 20 bp, synthetic construct
  source 1..20: mol_type = other DNA
gtatagcgccaagcctacag

SEQ ID NO: 1201 - DNA, 20 bp, synthetic construct
  source 1..20: mol_type = other DNA
aaccggaatgctattgacgg

SEQ ID NO: 1202 - DNA, 20 bp, synthetic construct
  source 1..20: mol_type = other DNA
ttgttttgttcaaaatgtct

SEQ ID NO: 1203 - DNA, 20 bp, synthetic construct
  source 1..20: mol_type = other DNA
tctaggacttcttcgcatcg

SEQ ID NO: 1204 - DNA, 20 bp, synthetic construct
  source 1..20: mol_type = other DNA
cctagtttagtctcttggat

SEQ ID NO: 1205 - DNA, 20 bp, synthetic construct
  source 1..20: mol_type = other DNA
tttaaattccaataccacat

SEQ ID NO: 1206 - DNA, 20 bp, synthetic construct
  source 1..20: mol_type = other DNA
agcatcctttgaactttaga

SEQ ID NO: 1207 - DNA, 20 bp, synthetic construct
  source 1..20: mol_type = other DNA
gcgggataatcacttgagct

SEQ ID NO: 1208 - DNA, 20 bp, synthetic construct
  source 1..20: mol_type = other DNA
actctgtaacacacgcctgc

SEQ ID NO: 1209 - DNA, 20 bp, synthetic construct
  source 1..20: mol_type = other DNA
aagcgttttgcgcaggagag

SEQ ID NO: 1210 - DNA, 20 bp, synthetic construct
  source 1..20: mol_type = other DNA
agagctttggccgaggacga

SEQ ID NO: 1211 - DNA, 20 bp, synthetic construct
  source 1..20: mol_type = other DNA
agagacagaaagtcgatccg

SEQ ID NO: 1212 - DNA, 20 bp, synthetic construct
  source 1..20: mol_type = other DNA
ctattaaaaaggatgaggtc

SEQ ID NO: 1213 - DNA, 20 bp, synthetic construct
  source 1..20: mol_type = other DNA
tgaaggacagaagcagtgga

SEQ ID NO: 1214 - DNA, 20 bp, synthetic construct
  source 1..20: mol_type = other DNA
ctgaaggacagaagcagtgg

SEQ ID NO: 1215 - DNA, 20 bp, synthetic construct
  source 1..20: mol_type = other DNA
taccttatttcactgtaatg

SEQ ID NO: 1216 - DNA, 20 bp, synthetic construct
  source 1..20: mol_type = other DNA
aattagacctgcccagttag

SEQ ID NO: 1217 - DNA, 20 bp, synthetic construct
  source 1..20: mol_type = other DNA
ctgatatccactaactgggc

SEQ ID NO: 1218 - DNA, 20 bp, synthetic construct
  source 1..20: mol_type = other DNA
attgctgatatccactaact

SEQ ID NO: 1219 - DNA, 20 bp, synthetic construct
  source 1..20: mol_type = other DNA
caggctgtcaggaggcatga

SEQ ID NO: 1220 - DNA, 20 bp, synthetic construct
  source 1..20: mol_type = other DNA
aaatatcttacttcattact

SEQ ID NO: 1221 - DNA, 20 bp, synthetic construct
  source 1..20: mol_type = other DNA
ttttctggtatgatactatt

SEQ ID NO: 1222 - DNA, 20 bp, synthetic construct
  source 1..20: mol_type = other DNA
ctggtatgatactattaggt

SEQ ID NO: 1223 - DNA, 20 bp, synthetic construct
  source 1..20: mol_type = other DNA
atctcttgatgaacagctac

SEQ ID NO: 1224 - DNA, 20 bp, synthetic construct
  source 1..20: mol_type = other DNA
gatgaacagctacaggcctg

SEQ ID NO: 1225 - DNA, 20 bp, synthetic construct
  source 1..20: mol_type = other DNA
acagctacaggcctgaggtt

SEQ ID NO: 1226 - DNA, 20 bp, synthetic construct
  source 1..20: mol_type = other DNA
ctacatgaactcctaacctc

SEQ ID NO: 1227 - DNA, 20 bp, synthetic construct
  source 1..20: mol_type = other DNA
gtccttcagcctcaacttat

SEQ ID NO: 1228 - DNA, 20 bp, synthetic construct
  source 1..20: mol_type = other DNA
cacctataagttgaggctga

SEQ ID NO: 1229 - DNA, 20 bp, synthetic construct
  source 1..20: mol_type = other DNA
acacagtcacctataagttg

SEQ ID NO: 1230 - DNA, 20 bp, synthetic construct
  source 1..20: mol_type = other DNA
tcgttaactccgcagagcac

SEQ ID NO: 1231 - DNA, 20 bp, synthetic construct
  source 1..20: mol_type = other DNA
cgttaactccgcagagcaca

SEQ ID NO: 1232 - DNA, 20 bp, synthetic construct
  source 1..20: mol_type = other DNA
ggatggtgccctgtgctctg

SEQ ID NO: 1233 - DNA, 20 bp, synthetic construct
  source 1..20: mol_type = other DNA
ctatccccagcacctaaagc

SEQ ID NO: 1234 - DNA, 20 bp, synthetic construct
  source 1..20: mol_type = other DNA
tatccccagcacctaaagct

SEQ ID NO: 1235 - DNA, 20 bp, synthetic construct
  source 1..20: mol_type = other DNA
ggtagggatttaggaaaaag

SEQ ID NO: 1236 - DNA, 20 bp, synthetic construct
  source 1..20: mol_type = other DNA
agggatttaggaaaaagagg

SEQ ID NO: 1237 - DNA, 20 bp, synthetic construct
  source 1..20: mol_type = other DNA
tttaggaaaaagaggaggct

SEQ ID NO: 1238 - DNA, 20 bp, synthetic construct
  source 1..20: mol_type = other DNA
aggaaaaagaggaggcttgg

SEQ ID NO: 1239 - DNA, 20 bp, synthetic construct
  source 1..20: mol_type = other DNA
gatcatctagcacatgtttt

SEQ ID NO: 1240 - DNA, 20 bp, synthetic construct
  source 1..20: mol_type = other DNA
ctagcacatgtttttggttt

SEQ ID NO: 1241 - DNA, 20 bp, synthetic construct
  source 1..20: mol_type = other DNA
tatctggtgggtagctactt

SEQ ID NO: 1242 - DNA, 20 bp, synthetic construct
  source 1..20: mol_type = other DNA
ggtgggtagctacttaggag

SEQ ID NO: 1243 - DNA, 20 bp, synthetic construct
  source 1..20: mol_type = other DNA
cctgcttcctgcttcatccc

SEQ ID NO: 1244 - DNA, 20 bp, synthetic construct
  source 1..20: mol_type = other DNA
gaaggtgccagggatgaagc

SEQ ID NO: 1245 - DNA, 20 bp, synthetic construct
  source 1..20: mol_type = other DNA
ttgccccttccgccatggga

SEQ ID NO: 1246 - DNA, 20 bp, synthetic construct
  source 1..20: mol_type = other DNA
cttgccccttccgccatggg

SEQ ID NO: 1247 - DNA, 20 bp, synthetic construct
  source 1..20: mol_type = other DNA
tagcttgccccttccgccat

SEQ ID NO: 1248 - DNA, 20 bp, synthetic construct
  source 1..20: mol_type = other DNA
ctagcttgccccttccgcca

SEQ ID NO: 1249 - DNA, 20 bp, synthetic construct
  source 1..20: mol_type = other DNA
actaacattcacatcatagc

SEQ ID NO: 1250 - DNA, 20 bp, synthetic construct
  source 1..20: mol_type = other DNA
ctaacattcacatcatagca

SEQ ID NO: 1251 - DNA, 20 bp, synthetic construct
  source 1..20: mol_type = other DNA
tcacatcatagcagggactc

SEQ ID NO: 1252 - DNA, 20 bp, synthetic construct
  source 1..20: mol_type = other DNA
catcatagcagggactctgg

SEQ ID NO: 1253 - DNA, 20 bp, synthetic construct
  source 1..20: mol_type = other DNA
gggagcgccatctttgtagc

SEQ ID NO: 1254 - DNA, 20 bp, synthetic construct
  source 1..20: mol_type = other DNA
tcaagtagcaatgaaggtta

SEQ ID NO: 1255 - DNA, 20 bp, synthetic construct
  source 1..20: mol_type = other DNA
ctcaagtagcaatgaaggtt

SEQ ID NO: 1256 - DNA, 20 bp, synthetic construct
  source 1..20: mol_type = other DNA
ggaagacctgtgcatttttg

SEQ ID NO: 1257 - DNA, 20 bp, synthetic construct
  source 1..20: mol_type = other DNA
aactgtccacaaaaatgcac

SEQ ID NO: 1258 - DNA, 20 bp, synthetic construct
  source 1..20: mol_type = other DNA
atttatttttagcagagaca

SEQ ID NO: 1259 - DNA, 20 bp, synthetic construct
  source 1..20: mol_type = other DNA
ggttggtgcaagagtaactg

SEQ ID NO: 1260 - DNA, 20 bp, synthetic construct
  source 1..20: mol_type = other DNA
atatcggctcactgcaaccc

SEQ ID NO: 1261 - DNA, 20 bp, synthetic construct
  source 1..20: mol_type = other DNA
agccagcatcttctctccct

SEQ ID NO: 1262 - DNA, 20 bp, synthetic construct
  source 1..20: mol_type = other DNA
cacctgtgatccgagctact

SEQ ID NO: 1263 - DNA, 20 bp, synthetic construct
  source 1..20: mol_type = other DNA
tactcgggggaggctgaagc

SEQ ID NO: 1264 - DNA, 20 bp, synthetic construct
  source 1..20: mol_type = other DNA
gaacgaggtggagtttggcc

SEQ ID NO: 1265 - DNA, 20 bp, synthetic construct
  source 1..20: mol_type = other DNA
gcatcactgcacctcagtct

SEQ ID NO: 1266 - DNA, 20 bp, synthetic construct
  source 1..20: mol_type = other DNA
tgggttttgccatattgctc

SEQ ID NO: 1267 - DNA, 20 bp, synthetic construct
  source 1..20: mol_type = other DNA
ctacttaggagtggaattgc

SEQ ID NO: 1268 - DNA, 20 bp, synthetic construct
  source 1..20: mol_type = other DNA
ttcagcctcccccgagtagc

SEQ ID NO: 1269 - DNA, 20 bp, synthetic construct
  source 1..20: mol_type = other DNA
cacttccactgccaccaccc

SEQ ID NO: 1270 - DNA, 20 bp, synthetic construct
  source 1..20: mol_type = other DNA
tgcatcactgcacctcagtc

SEQ ID NO: 1271 - DNA, 20 bp, synthetic construct
  source 1..20: mol_type = other DNA
tccacagccttgtcaacact

SEQ ID NO: 1272 - DNA, 20 bp, synthetic construct
  source 1..20: mol_type = other DNA
ctctgggggagcatacagac

SEQ ID NO: 1273 - DNA, 20 bp, synthetic construct
  source 1..20: mol_type = other DNA
tcccccagaggtttgagcag

SEQ ID NO: 1274 - DNA, 20 bp, synthetic construct
  source 1..20: mol_type = other DNA
agggagagaagatgctggct

SEQ ID NO: 1275 - DNA, 20 bp, synthetic construct
  source 1..20: mol_type = other DNA
tcttagcctaggaagattca

SEQ ID NO: 1276 - DNA, 20 bp, synthetic construct
  source 1..20: mol_type = other DNA
gtatctcagggttcttgcct

SEQ ID NO: 1277 - DNA, 20 bp, synthetic construct
  source 1..20: mol_type = other DNA
ctcaagtggtttgcccgcct

SEQ ID NO: 1278 - DNA, 20 bp, synthetic construct
  source 1..20: mol_type = other DNA
caaaaccagcctgagcaata

SEQ ID NO: 1279 - DNA, 20 bp, synthetic construct
  source 1..20: mol_type = other DNA
tgaggcgggtctatcacctg

SEQ ID NO: 1280 - DNA, 20 bp, synthetic construct
  source 1..20: mol_type = other DNA
tgcccaggggctgggggagg

SEQ ID NO: 1281 - DNA, 20 bp, synthetic construct
  source 1..20: mol_type = other DNA
cagccatgagccactgcgtc

SEQ ID NO: 1282 - DNA, 20 bp, synthetic construct
  source 1..20: mol_type = other DNA
taagatgtggggcctttggg

SEQ ID NO: 1283 - DNA, 20 bp, synthetic construct
  source 1..20: mol_type = other DNA
caaaaagtatctgggcatga

SEQ ID NO: 1284 - DNA, 20 bp, synthetic construct
  source 1..20: mol_type = other DNA
ttaaattaattaaaattggc

SEQ ID NO: 1285 - DNA, 20 bp, synthetic construct
  source 1..20: mol_type = other DNA
tggaagtgagcagagagaga

SEQ ID NO: 1286 - DNA, 20 bp, synthetic construct
  source 1..20: mol_type = other DNA
ccgtctgtatgctcccccag

SEQ ID NO: 1287 - DNA, 20 bp, synthetic construct
  source 1..20: mol_type = other DNA
cagcatttgggcacgaaggc

SEQ ID NO: 1288 - DNA, 20 bp, synthetic construct
  source 1..20: mol_type = other DNA
catgccctgagatggggaca

SEQ ID NO: 1289 - DNA, 20 bp, synthetic construct
  source 1..20: mol_type = other DNA
acttccactgccaccaccct

SEQ ID NO: 1290 - DNA, 20 bp, synthetic construct
  source 1..20: mol_type = other DNA
tttacagctgaggccccagc

SEQ ID NO: 1291 - DNA, 20 bp, synthetic construct
  source 1..20: mol_type = other DNA
atgccctgagatggggacaa

SEQ ID NO: 1292 - DNA, 20 bp, synthetic construct
  source 1..20: mol_type = other DNA
ttgaatgaatgaatgctttg

SEQ ID NO: 1293 - DNA, 20 bp, synthetic construct
  source 1..20: mol_type = other DNA
aatgcagcatttgggcacga

SEQ ID NO: 1294 - DNA, 20 bp, synthetic construct
  source 1..20: mol_type = other DNA
taaaattacaaaaatgatcc

SEQ ID NO: 1295 - DNA, 20 bp, synthetic construct
  source 1..20: mol_type = other DNA
ggaaggagctctcagcagat

SEQ ID NO: 1296 - DNA, 20 bp, synthetic construct
  source 1..20: mol_type = other DNA
aagtatctgggcatgatggc

SEQ ID NO: 1297 - DNA, 20 bp, synthetic construct
  source 1..20: mol_type = other DNA
tgccccgctgctcaaacctc

SEQ ID NO: 1298 - DNA, 20 bp, synthetic construct
  source 1..20: mol_type = other DNA
tgcagctattaaaaaggatg

SEQ ID NO: 1299 - DNA, 20 bp, synthetic construct
  source 1..20: mol_type = other DNA
acgccactgtactcccagcc

SEQ ID NO: 1300 - DNA, 20 bp, synthetic construct
  source 1..20: mol_type = other DNA
tattgtatttcttgtagaga

SEQ ID NO: 1301 - DNA, 20 bp, synthetic construct
  source 1..20: mol_type = other DNA
tgagtctcgctcagtcaccc

SEQ ID NO: 1302 - DNA, 20 bp, synthetic construct
  source 1..20: mol_type = other DNA
ttggcggaagaagacacaag

SEQ ID NO: 1303 - DNA, 20 bp, synthetic construct
  source 1..20: mol_type = other DNA
ccgagctacttggaagactg

SEQ ID NO: 1304 - DNA, 20 bp, synthetic construct
  source 1..20: mol_type = other DNA
aaggagctctcagcagatag

SEQ ID NO: 1305 - DNA, 20 bp, synthetic construct
  source 1..20: mol_type = other DNA
tgaagcacttgaaatgtggc

SEQ ID NO: 1306 - DNA, 20 bp, synthetic construct
  source 1..20: mol_type = other DNA
gaaggagctctcagcagata

SEQ ID NO: 1307 - DNA, 20 bp, synthetic construct
  source 1..20: mol_type = other DNA
ggagggaaggaatatcacac

SEQ ID NO: 1308 - DNA, 20 bp, synthetic construct
  source 1..20: mol_type = other DNA
gagggaaggaatatcacaca

SEQ ID NO: 1309 - DNA, 20 bp, synthetic construct
  source 1..20: mol_type = other DNA
tggccggacgcagtggctca

SEQ ID NO: 1310 - DNA, 20 bp, synthetic construct
  source 1..20: mol_type = other DNA
cgggtctatcacctgaggtc

SEQ ID NO: 1311 - DNA, 20 bp, synthetic construct
  source 1..20: mol_type = other DNA
tggctgtaattctaacactt

SEQ ID NO: 1312 - DNA, 20 bp, synthetic construct
  source 1..20: mol_type = other DNA
ggctgtaattctaacacttt

SEQ ID NO: 1313 - DNA, 20 bp, synthetic construct
  source 1..20: mol_type = other DNA
ggcttgagccctggagttca

SEQ ID NO: 1314 - DNA, 20 bp, synthetic construct
  source 1..20: mol_type = other DNA
cctctgggggagcatacaga

SEQ ID NO: 1315 - DNA, 20 bp, synthetic construct
  source 1..20: mol_type = other DNA
gggggagcatacagacgggc

SEQ ID NO: 1316 - DNA, 20 bp, synthetic construct
  source 1..20: mol_type = other DNA
agggtctcgccatgctgccc

SEQ ID NO: 1317 - DNA, 20 bp, synthetic construct
  source 1..20: mol_type = other DNA
atgagccactgcgtccggcc

SEQ ID NO: 1318 - DNA, 20 bp, synthetic construct
  source 1..20: mol_type = other DNA
gaggagaatcgattgaaccc

SEQ ID NO: 1319 - DNA, 20 bp, synthetic construct
  source 1..20: mol_type = other DNA
caaggcaggagtatcacctg

SEQ ID NO: 1320 - DNA, 20 bp, synthetic construct
  source 1..20: mol_type = other DNA
acaaaaggggccgggcgcgg

SEQ ID NO: 1321 - DNA, 20 bp, synthetic construct
  source 1..20: mol_type = other DNA
aaaaaggatgagttcatgta

SEQ ID NO: 1322 - DNA, 20 bp, synthetic construct
  source 1..20: mol_type = other DNA
ctgtcgtggggtgggggagc

SEQ ID NO: 1323 - DNA, 20 bp, synthetic construct
  source 1..20: mol_type = other DNA
cgccactgtactcccagcct

SEQ ID NO: 1324 - DNA, 20 bp, synthetic construct
  source 1..20: mol_type = other DNA
tgcccaggctgggagtacag

SEQ ID NO: 1325 - DNA, 20 bp, synthetic construct
  source 1..20: mol_type = other DNA
caaaaatacaaaaagtatct

SEQ ID NO: 1326 - DNA, 20 bp, synthetic construct
  source 1..20: mol_type = other DNA
acaaaaatacaaaaagtatc

SEQ ID NO: 1327 - DNA, 20 bp, synthetic construct
  source 1..20: mol_type = other DNA
cgggcaaaccacttgaggtc

SEQ ID NO: 1328 - DNA, 20 bp, synthetic construct
  source 1..20: mol_type = other DNA
ttgtatctttagtagagcca

SEQ ID NO: 1329 - DNA, 20 bp, synthetic construct
  source 1..20: mol_type = other DNA
aataaattagccggatgtgg

SEQ ID NO: 1330 - DNA, 20 bp, synthetic construct
  source 1..20: mol_type = other DNA
gagacagggtttcagcatgc

SEQ ID NO: 1331 - DNA, 20 bp, synthetic construct
  source 1..20: mol_type = other DNA
cccccagaggtttgagcagc

SEQ ID NO: 1332 - DNA, 20 bp, synthetic construct
  source 1..20: mol_type = other DNA
aaaaaaggatgagttcatgt

SEQ ID NO: 1333 - DNA, 20 bp, synthetic construct
  source 1..20: mol_type = other DNA
agcaccactgcactccagtg

SEQ ID NO: 1334 - DNA, 20 bp, synthetic construct
  source 1..20: mol_type = other DNA
caggtgtcctgccctatacc

SEQ ID NO: 1335 - DNA, 20 bp, synthetic construct
  source 1..20: mol_type = other DNA
gcttgtagtcccagctacca

SEQ ID NO: 1336 - DNA, 20 bp, synthetic construct
  source 1..20: mol_type = other DNA
gatgagttcatgtagggaca

SEQ ID NO: 1337 - DNA, 20 bp, synthetic construct
  source 1..20: mol_type = other DNA
ccatgggaggctgaggtgag

SEQ ID NO: 1338 - DNA, 20 bp, synthetic construct
  source 1..20: mol_type = other DNA
tatttatttttagcagagac

SEQ ID NO: 1339 - DNA, 20 bp, synthetic construct
  source 1..20: mol_type = other DNA
tttgtatctttagtagagcc

SEQ ID NO: 1340 - DNA, 20 bp, synthetic construct
  source 1..20: mol_type = other DNA
agacggggtttcaccaggtt

SEQ ID NO: 1341 - DNA, 20 bp, synthetic construct
  source 1..20: mol_type = other DNA
gggcttgcagaatgagtgca

SEQ ID NO: 1342 - DNA, 20 bp, synthetic construct
  source 1..20: mol_type = other DNA
ggcctgcttcagggaagaag

SEQ ID NO: 1343 - DNA, 20 bp, synthetic construct
  source 1..20: mol_type = other DNA
agggtttcagcatgctggcc

SEQ ID NO: 1344 - DNA, 20 bp, synthetic construct
  source 1..20: mol_type = other DNA
tgagaccagcctgcccaacc

SEQ ID NO: 1345 - DNA, 20 bp, synthetic construct
  source 1..20: mol_type = other DNA
caggcatgagctaccccgcc

SEQ ID NO: 1346 - DNA, 20 bp, synthetic construct
  source 1..20: mol_type = other DNA
aaaaaaaaaaaaacaagtct

SEQ ID NO: 1347 - DNA, 20 bp, synthetic construct
  source 1..20: mol_type = other DNA
ataaaataccataaactagg

SEQ ID NO: 1348 - DNA, 20 bp, synthetic construct
  source 1..20: mol_type = other DNA
gccggtaatcccagttactc

SEQ ID NO: 1349 - DNA, 20 bp, synthetic construct
  source 1..20: mol_type = other DNA
tgttaatttttttgtagaga

SEQ ID NO: 1350 - DNA, 20 bp, synthetic construct
  source 1..20: mol_type = other DNA
ctcaaacttctgagctcaag

SEQ ID NO: 1351 - DNA, 20 bp, synthetic construct
  source 1..20: mol_type = other DNA
atactatgcagctattaaaa

SEQ ID NO: 1352 - DNA, 20 bp, synthetic construct
  source 1..20: mol_type = other DNA
agaaaagaggccaggtgcag

SEQ ID NO: 1353 - DNA, 20 bp, synthetic construct
  source 1..20: mol_type = other DNA
gttaatttttttgtagagac

SEQ ID NO: 1354 - DNA, 20 bp, synthetic construct
  source 1..20: mol_type = other DNA
cttcaggaggccaaggccag

SEQ ID NO: 1355 - DNA, 20 bp, synthetic construct
  source 1..20: mol_type = other DNA
caaaaatgatccgggcgtgg

SEQ ID NO: 1356 - DNA, 20 bp, synthetic construct
  source 1..20: mol_type = other DNA
gcacaggatgggggcgtggt

SEQ ID NO: 1357 - DNA, 20 bp, synthetic construct
  source 1..20: mol_type = other DNA
ggtctggaactctcgacctc

SEQ ID NO: 1358 - DNA, 20 bp, synthetic construct
  source 1..20: mol_type = other DNA
tgccaaatagttttccaaag

SEQ ID NO: 1359 - DNA, 20 bp, synthetic construct
  source 1..20: mol_type = other DNA
cctgtcacatgagggtcttc

SEQ ID NO: 1360 - DNA, 20 bp, synthetic construct
  source 1..20: mol_type = other DNA
cctctaatcccagctactcg

SEQ ID NO: 1361 - DNA, 20 bp, synthetic construct
  source 1..20: mol_type = other DNA
ggctgggaagtccacgatca

SEQ ID NO: 1362 - DNA, 20 bp, synthetic construct
  source 1..20: mol_type = other DNA
cctgaagaccctcatgtgac

SEQ ID NO: 1363 - DNA, 20 bp, synthetic construct
  source 1..20: mol_type = other DNA
cggaagaagacacaagtggc

SEQ ID NO: 1364 - DNA, 20 bp, synthetic construct
  source 1..20: mol_type = other DNA
gcaggacacctgtcacatga

SEQ ID NO: 1365 - DNA, 20 bp, synthetic construct
  source 1..20: mol_type = other DNA
tgtcacatgagggtcttcag

SEQ ID NO: 1366 - DNA, 20 bp, synthetic construct
  source 1..20: mol_type = other DNA
cagcagataggggagccaga

SEQ ID NO: 1367 - DNA, 20 bp, synthetic construct
  source 1..20: mol_type = other DNA
gggttttcaccatgtttccc

SEQ ID NO: 1368 - DNA, 20 bp, synthetic construct
  source 1..20: mol_type = other DNA
ccccgagtagctgggattag

SEQ ID NO: 1369 - DNA, 20 bp, synthetic construct
  source 1..20: mol_type = other DNA
cacttgagctggggaggcgg

SEQ ID NO: 1370 - DNA, 20 bp, synthetic construct
  source 1..20: mol_type = other DNA
atcaaggtgccagcagattt

SEQ ID NO: 1371 - DNA, 20 bp, synthetic construct
  source 1..20: mol_type = other DNA
ctgtcacatgagggtcttca

SEQ ID NO: 1372 - DNA, 20 bp, synthetic construct
  source 1..20: mol_type = other DNA
gtccgtgggcacaggcctgg

SEQ ID NO: 1373 - DNA, 20 bp, synthetic construct
  source 1..20: mol_type = other DNA
ggcaggacacctgtcacatg

SEQ ID NO: 1374 - DNA, 20 bp, synthetic construct
  source 1..20: mol_type = other DNA
agcagataggggagccagaa

SEQ ID NO: 1375 - DNA, 20 bp, synthetic construct
  source 1..20: mol_type = other DNA
cgcttgtgtgtctgcctgct

SEQ ID NO: 1376 - DNA, 20 bp, synthetic construct
  source 1..20: mol_type = other DNA
ccggcatgcgccaccatgcc

SEQ ID NO: 1377 - DNA, 20 bp, synthetic construct
  source 1..20: mol_type = other DNA
ccagaccagcctggccaagg

SEQ ID NO: 1378 - DNA, 20 bp, synthetic construct
  source 1..20: mol_type = other DNA
cgtgggcacaggcctggggg

SEQ ID NO: 1379 - DNA, 20 bp, synthetic construct
  source 1..20: mol_type = other DNA
agaaaactgcagaagcagga

SEQ ID NO: 1380 - DNA, 20 bp, synthetic construct
  source 1..20: mol_type = other DNA
ctctaatcccagctactcgg

SEQ ID NO: 1381 - DNA, 20 bp, synthetic construct
  source 1..20: mol_type = other DNA
ggatgggggcgtggtgggcc

SEQ ID NO: 1382 - DNA, 20 bp, synthetic construct
  source 1..20: mol_type = other DNA
ctcaggtgatactcctgcct

SEQ ID NO: 1383 - DNA, 20 bp, synthetic construct
  source 1..20: mol_type = other DNA
ccaccttggccaggctggtc

SEQ ID NO: 1384 - DNA, 20 bp, synthetic construct
  source 1..20: mol_type = other DNA
gtcttgggaaatgcagcatt

SEQ ID NO: 1385 - DNA, 20 bp, synthetic construct
  source 1..20: mol_type = other DNA
ccaggcatggtggcgcatgc

SEQ ID NO: 1386 - DNA, 20 bp, synthetic construct
  source 1..20: mol_type = other DNA
cggaagaatcagatcacacg

SEQ ID NO: 1387 - DNA, 20 bp, synthetic construct
  source 1..20: mol_type = other DNA
ggggtttcaccaggttgggc

SEQ ID NO: 1388 - DNA, 20 bp, synthetic construct
  source 1..20: mol_type = other DNA
tcactgatggacgtttgggt

SEQ ID NO: 1389 - DNA, 20 bp, synthetic construct
  source 1..20: mol_type = other DNA
aacgtccatcagtgatagac

SEQ ID NO: 1390 - DNA, 20 bp, synthetic construct
  source 1..20: mol_type = other DNA
tctatcactgatggacgttt

SEQ ID NO: 1391 - DNA, 20 bp, synthetic construct
  source 1..20: mol_type = other DNA
gatgggggcgtggtgggcca

SEQ ID NO: 1392 - DNA, 20 bp, synthetic construct
  source 1..20: mol_type = other DNA
gcgaggaacatcacacactg

SEQ ID NO: 1393 - DNA, 20 bp, synthetic construct
  source 1..20: mol_type = other DNA
aatcacttgagctggggagg

SEQ ID NO: 1394 - DNA, 20 bp, synthetic construct
  source 1..20: mol_type = other DNA
caggagtatcacctgaggtc

SEQ ID NO: 1395 - DNA, 20 bp, synthetic construct
  source 1..20: mol_type = other DNA
gtggggtgggggagcgggga

SEQ ID NO: 1396 - DNA, 20 bp, synthetic construct
  source 1..20: mol_type = other DNA
tttcaccaggttgggcaggc

SEQ ID NO: 1397 - DNA, 20 bp, synthetic construct
  source 1..20: mol_type = other DNA
tcttgggaaatgcagcattt

SEQ ID NO: 1398 - DNA, 20 bp, synthetic construct
  source 1..20: mol_type = other DNA
gttccagaccagcctggcca

SEQ ID NO: 1399 - DNA, 20 bp, synthetic construct
  source 1..20: mol_type = other DNA
tctcgccatgctgcccaggc

SEQ ID NO: 1400 - DNA, 20 bp, synthetic construct
  source 1..20: mol_type = other DNA
tttcagcatgctggccaggc

SEQ ID NO: 1401 - DNA, 20 bp, synthetic construct
  source 1..20: mol_type = other DNA
gggggcgtggtgggccaggg

SEQ ID NO: 1402 - DNA, 20 bp, synthetic construct
  source 1..20: mol_type = other DNA
gtctatcactgatggacgtt

SEQ ID NO: 1403 - DNA, 20 bp, synthetic construct
  source 1..20: mol_type = other DNA
taacacaagccgcctacaga

SEQ ID NO: 1404 - DNA, 20 bp, synthetic construct
  source 1..20: mol_type = other DNA
aatagctgcatagtattcca

SEQ ID NO: 1405 - DNA, 20 bp, synthetic construct
  source 1..20: mol_type = other DNA
tcctgcctcaggctcccgag

SEQ ID NO: 1406 - DNA, 20 bp, synthetic construct
  source 1..20: mol_type = other DNA
ctagcaggcagacacacaag

SEQ ID NO: 1407 - DNA, 20 bp, synthetic construct
  source 1..20: mol_type = other DNA
gccactcgggagcctgaggc

SEQ ID NO: 1408 - DNA, 20 bp, synthetic construct
  source 1..20: mol_type = other DNA
aggtccgtgggcacaggcct

SEQ ID NO: 1409 - DNA, 20 bp, synthetic construct
  source 1..20: mol_type = other DNA
gcctcaggctcccgagtggc

SEQ ID NO: 1410 - DNA, 20 bp, synthetic construct
  source 1..20: mol_type = other DNA
cccagccactcgggagcctg

SEQ ID NO: 1411 - DNA, 20 bp, synthetic construct
  source 1..20: mol_type = other DNA
tgtagagacggggtttcacc

SEQ ID NO: 1412 - DNA, 20 bp, synthetic construct
  source 1..20: mol_type = other DNA
actgccactgtactccagcc

SEQ ID NO: 1413 - DNA, 20 bp, synthetic construct
  source 1..20: mol_type = other DNA
tctcaaacttctgagctcaa

SEQ ID NO: 1414 - DNA, 20 bp, synthetic construct
  source 1..20: mol_type = other DNA
gtctcaaacttctgagctca

SEQ ID NO: 1415 - DNA, 20 bp, synthetic construct
  source 1..20: mol_type = other DNA
cctcaggctcccgagtggct

SEQ ID NO: 1416 - DNA, 20 bp, synthetic construct
  source 1..20: mol_type = other DNA
aggcctgtgcccacggacct

SEQ ID NO: 1417 - DNA, 20 bp, synthetic construct
  source 1..20: mol_type = other DNA
acctgtaatcccagccacct

SEQ ID NO: 1418 - DNA, 20 bp, synthetic construct
  source 1..20: mol_type = other DNA
agagtctcgctgtgttgctc

SEQ ID NO: 1419 - DNA, 20 bp, synthetic construct
  source 1..20: mol_type = other DNA
taggtccgtgggcacaggcc

SEQ ID NO: 1420 - DNA, 20 bp, synthetic construct
  source 1..20: mol_type = other DNA
cacccccaggcctgtgccca

SEQ ID NO: 1421 - DNA, 20 bp, synthetic construct
  source 1..20: mol_type = other DNA
tcagcctcccccgagtagct

SEQ ID NO: 1422 - DNA, 20 bp, synthetic construct
  source 1..20: mol_type = other DNA
ggcacaggatgggggcgtgg

SEQ ID NO: 1423 - DNA, 20 bp, synthetic construct
  source 1..20: mol_type = other DNA
gcttgtgtgtctgcctgcta

SEQ ID NO: 1424 - DNA, 20 bp, synthetic construct
  source 1..20: mol_type = other DNA
cctctcacctcagcctccca

SEQ ID NO: 1425 - DNA, 20 bp, synthetic construct
  source 1..20: mol_type = other DNA
ataataaaataccataaact

SEQ ID NO: 1426 - DNA, 20 bp, synthetic construct
  source 1..20: mol_type = other DNA
cacctgtaatcccagccacc

SEQ ID NO: 1427 - DNA, 20 bp, synthetic construct
  source 1..20: mol_type = other DNA
cgtctgtaatcccagccact

SEQ ID NO: 1428 - DNA, 20 bp, synthetic construct
  source 1..20: mol_type = other DNA
aggagaatcacttgaaaccc

SEQ ID NO: 1429 - DNA, 20 bp, synthetic construct
  source 1..20: mol_type = other DNA
taatcccagctactcggggg

SEQ ID NO: 1430 - DNA, 20 bp, synthetic construct
  source 1..20: mol_type = other DNA
gggattacagccaccatgcc

SEQ ID NO: 1431 - DNA, 20 bp, synthetic construct
  source 1..20: mol_type = other DNA
ctggaactcctgacctcaag

SEQ ID NO: 1432 - DNA, 20 bp, synthetic construct
  source 1..20: mol_type = other DNA
tacttaggagtggaattgct

SEQ ID NO: 1433 - DNA, 20 bp, synthetic construct
  source 1..20: mol_type = other DNA
ggtccgtgggcacaggcctg

SEQ ID NO: 1434 - DNA, 20 bp, synthetic construct
  source 1..20: mol_type = other DNA
gagccaccatgcccggccca

SEQ ID NO: 1435 - DNA, 20 bp, synthetic construct
  source 1..20: mol_type = other DNA
cttactcttgtcgcccaggc

SEQ ID NO: 1436 - DNA, 20 bp, synthetic construct
  source 1..20: mol_type = other DNA
cctgtcgtggggtgggggag

SEQ ID NO: 1437 - DNA, 20 bp, synthetic construct
  source 1..20: mol_type = other DNA
aggaggtcgaggctgcagtg

SEQ ID NO: 1438 - DNA, 20 bp, synthetic construct
  source 1..20: mol_type = other DNA
ggaagaatcagatcacacgt

SEQ ID NO: 1439 - DNA, 20 bp, synthetic construct
  source 1..20: mol_type = other DNA
atacagacgggcaggctgtg

SEQ ID NO: 1440 - DNA, 20 bp, synthetic construct
  source 1..20: mol_type = other DNA
gagtggaattgctgggtcat

SEQ ID NO: 1441 - DNA, 20 bp, synthetic construct
  source 1..20: mol_type = other DNA
gcctgtcatcccagctacta

SEQ ID NO: 1442 - DNA, 20 bp, synthetic construct
  source 1..20: mol_type = other DNA
tttataagccacctagttta

SEQ ID NO: 1443 - DNA, 20 bp, synthetic construct
  source 1..20: mol_type = other DNA
gcatacagacgggcaggctg

SEQ ID NO: 1444 - DNA, 20 bp, synthetic construct
  source 1..20: mol_type = other DNA
tggtgggccagggtggtctt

SEQ ID NO: 1445 - DNA, 20 bp, synthetic construct
  source 1..20: mol_type = other DNA
tcactctgtcacccagactg

SEQ ID NO: 1446 - DNA, 20 bp, synthetic construct
  source 1..20: mol_type = other DNA
catacagacgggcaggctgt

SEQ ID NO: 1447 - DNA, 20 bp, synthetic construct
  source 1..20: mol_type = other DNA
aactgaacaatgaaaacact

SEQ ID NO: 1448 - DNA, 20 bp, synthetic construct
  source 1..20: mol_type = other DNA
cttactctgttgcccaggct

SEQ ID NO: 1449 - DNA, 20 bp, synthetic construct
  source 1..20: mol_type = other DNA
ggttttgaactcctgacctt

SEQ ID NO: 1450 - DNA, 20 bp, synthetic construct
  source 1..20: mol_type = other DNA
gtggtgggccagggtggtct

SEQ ID NO: 1451 - DNA, 20 bp, synthetic construct
  source 1..20: mol_type = other DNA
caggtgtgcaccaccatggc

SEQ ID NO: 1452 - DNA, 20 bp, synthetic construct
  source 1..20: mol_type = other DNA
tccctagtagctgggatgac

SEQ ID NO: 1453 - DNA, 20 bp, synthetic construct
  source 1..20: mol_type = other DNA
ttttgccatattgctcaggc

SEQ ID NO: 1454 - DNA, 20 bp, synthetic construct
  source 1..20: mol_type = other DNA
acttggaagactgaggtggg

SEQ ID NO: 1455 - DNA, 20 bp, synthetic construct
  source 1..20: mol_type = other DNA
ctcagcactttgggagggcg

SEQ ID NO: 1456 - DNA, 20 bp, synthetic construct
  source 1..20: mol_type = other DNA
gtgtctgcctgctagggtct

SEQ ID NO: 1457 - DNA, 20 bp, synthetic construct
  source 1..20: mol_type = other DNA
tgtcatcccagctactaggg

SEQ ID NO: 1458 - DNA, 20 bp, synthetic construct
  source 1..20: mol_type = other DNA
tgtgcccacggacctaggtg

SEQ ID NO: 1459 - DNA, 20 bp, synthetic construct
  source 1..20: mol_type = other DNA
gctacttggaagactgaggt

SEQ ID NO: 1460 - DNA, 20 bp, synthetic construct
  source 1..20: mol_type = other DNA
gccccgctgctcaaacctct

SEQ ID NO: 1461 - DNA, 20 bp, synthetic construct
  source 1..20: mol_type = other DNA
tctaacactttgggaggctg

SEQ ID NO: 1462 - DNA, 20 bp, synthetic construct
  source 1..20: mol_type = other DNA
tcacctaggtccgtgggcac

SEQ ID NO: 1463 - DNA, 20 bp, synthetic construct
  source 1..20: mol_type = other DNA
tcccaggtggctgggattac

SEQ ID NO: 1464 - DNA, 20 bp, synthetic construct
  source 1..20: mol_type = other DNA
agctacttggaagactgagg

SEQ ID NO: 1465 - DNA, 20 bp, synthetic construct
  source 1..20: mol_type = other DNA
caggccgatcacttgaggtc

SEQ ID NO: 1466 - DNA, 20 bp, synthetic construct
  source 1..20: mol_type = other DNA
cagacgtgtgccaccacgcc

SEQ ID NO: 1467 - DNA, 20 bp, synthetic construct
  source 1..20: mol_type = other DNA
gtctcaaattcctgggctca

SEQ ID NO: 1468 - DNA, 20 bp, synthetic construct
  source 1..20: mol_type = other DNA
actacaggtgtgcaccacca

SEQ ID NO: 1469 - DNA, 20 bp, synthetic construct
  source 1..20: mol_type = other DNA
gagacagggtttcaccacct

SEQ ID NO: 1470 - DNA, 20 bp, synthetic construct
  source 1..20: mol_type = other DNA
tgtaatcccagccacctggg

SEQ ID NO: 1471 - DNA, 20 bp, synthetic construct
  source 1..20: mol_type = other DNA
gactgtaatcccagcacttc

SEQ ID NO: 1472 - DNA, 20 bp, synthetic construct
  source 1..20: mol_type = other DNA
ctcaagcaatcctctggcct

SEQ ID NO: 1473 - DNA, 20 bp, synthetic construct
  source 1..20: mol_type = other DNA
tctcaaattcctgggctcaa

SEQ ID NO: 1474 - DNA, 20 bp, synthetic construct
  source 1..20: mol_type = other DNA
agggtttcaccaccttggcc

SEQ ID NO: 1475 - DNA, 20 bp, synthetic construct
  source 1..20: mol_type = other DNA
caggcgtgagcccctgcacc

SEQ ID NO: 1476 - DNA, 20 bp, synthetic construct
  source 1..20: mol_type = other DNA
ttgctcagggtggagtgcag

SEQ ID NO: 1477 - DNA, 20 bp, synthetic construct
  source 1..20: mol_type = other DNA
ataggcacaggatgggggcg

SEQ ID NO: 1478 - DNA, 20 bp, synthetic construct
  source 1..20: mol_type = other DNA
cactgcagccttgaactcca

SEQ ID NO: 1479 - DNA, 20 bp, synthetic construct
  source 1..20: mol_type = other DNA
gctactagggaggctgaggg

SEQ ID NO: 1480 - DNA, 20 bp, synthetic construct
  source 1..20: mol_type = other DNA
caggcacgcaccaccacatc

SEQ ID NO: 1481 - DNA, 20 bp, synthetic construct
  source 1..20: mol_type = other DNA
gccacctgggaggctgaggc

SEQ ID NO: 1482 - DNA, 20 bp, synthetic construct
  source 1..20: mol_type = other DNA
gaagactgcttgagcccagg

SEQ ID NO: 1483 - DNA, 20 bp, synthetic construct
  source 1..20: mol_type = other DNA
tcctgcctcagcctcccagg

SEQ ID NO: 1484 - DNA, 20 bp, synthetic construct
  source 1..20: mol_type = other DNA
taaataaataaaaattagcc

SEQ ID NO: 1485 - DNA, 20 bp, synthetic construct
  source 1..20: mol_type = other DNA
ttaatttttttgtagagacg

SEQ ID NO: 1486 - DNA, 20 bp, synthetic construct
  source 1..20: mol_type = other DNA
gcctcagcctcccaggtggc

SEQ ID NO: 1487 - DNA, 20 bp, synthetic construct
  source 1..20: mol_type = other DNA
ccctcagcctccctagtagc

SEQ ID NO: 1488 - DNA, 20 bp, synthetic construct
  source 1..20: mol_type = other DNA
aaaaaaaaaaaaaaagacat

SEQ ID NO: 1489 - DNA, 20 bp, synthetic construct
  source 1..20: mol_type = other DNA
aaaaaaaaagccaggcacag

SEQ ID NO: 1490 - DNA, 20 bp, synthetic construct
  source 1..20: mol_type = other DNA
cctgtcctcacctaggtccg

SEQ ID NO: 1491 - DNA, 20 bp, synthetic construct
  source 1..20: mol_type = other DNA
aacccgggagatggaggttg

SEQ ID NO: 1492 - DNA, 20 bp, synthetic construct
  source 1..20: mol_type = other DNA
gtctgtaatcccagccactc

SEQ ID NO: 1493 - DNA, 20 bp, synthetic construct
  source 1..20: mol_type = other DNA
gggtttcaacatatgaattt

SEQ ID NO: 1494 - DNA, 20 bp, synthetic construct
  source 1..20: mol_type = other DNA
ctgtcctcacctaggtccgt

SEQ ID NO: 1495 - DNA, 20 bp, synthetic construct
  source 1..20: mol_type = other DNA
ccacggacctaggtgaggac

SEQ ID NO: 1496 - DNA, 20 bp, synthetic construct
  source 1..20: mol_type = other DNA
tcttgctctgtcacccacac

SEQ ID NO: 1497 - DNA, 20 bp, synthetic construct
  source 1..20: mol_type = other DNA
tcttaagtagctgggactac

SEQ ID NO: 1498 - DNA, 20 bp, synthetic construct
  source 1..20: mol_type = other DNA
tcaccacaacctccatctcc

SEQ ID NO: 1499 - DNA, 20 bp, synthetic construct
  source 1..20: mol_type = other DNA
ccagctactagggaggctga

SEQ ID NO: 1500 - DNA, 20 bp, synthetic construct
  source 1..20: mol_type = other DNA
aggagtgcctgtcctcacct

SEQ ID NO: 1501 - DNA, 20 bp, synthetic construct
  source 1..20: mol_type = other DNA
caccacaacctccatctccc

SEQ ID NO: 1502 - DNA, 20 bp, synthetic construct
  source 1..20: mol_type = other DNA
gttactcaggaagctgaggc

SEQ ID NO: 1503 - DNA, 20 bp, synthetic construct
  source 1..20: mol_type = other DNA
tgtagtcccagctacttaag

SEQ ID NO: 1504 - DNA, 20 bp, synthetic construct
  source 1..20: mol_type = other DNA
ccagaggattgcttgagccc

SEQ ID NO: 1505 - DNA, 20 bp, synthetic construct
  source 1..20: mol_type = other DNA
ggcttgagcctgggaggttg

SEQ ID NO: 1506 - DNA, 20 bp, synthetic construct
  source 1..20: mol_type = other DNA
gatcaaggtgccagcagatt

SEQ ID NO: 1507 - DNA, 20 bp, synthetic construct
  source 1..20: mol_type = other DNA
cctcagcctcccaggtggct

SEQ ID NO: 1508 - DNA, 20 bp, synthetic construct
  source 1..20: mol_type = other DNA
gggaggctgaggtgagagga

SEQ ID NO: 1509 - DNA, 20 bp, synthetic construct
  source 1..20: mol_type = other DNA
cccagccacctgggaggctg

SEQ ID NO: 1510 - DNA, 20 bp, synthetic construct
  source 1..20: mol_type = other DNA
acaggtgcagcacaccaaca

SEQ ID NO: 1511 - DNA, 20 bp, synthetic construct
  source 1..20: mol_type = other DNA
gcaccactgcactccagtgt

SEQ ID NO: 1512 - DNA, 20 bp, synthetic construct
  source 1..20: mol_type = other DNA
gcctcagcttcctgagtaac

SEQ ID NO: 1513 - DNA, 20 bp, synthetic construct
  source 1..20: mol_type = other DNA
tgagaggatggcttgagccc

SEQ ID NO: 1514 - DNA, 20 bp, synthetic construct
  source 1..20: mol_type = other DNA
tgtaattctaacactttggg

SEQ ID NO: 1515 - DNA, 20 bp, synthetic construct
  source 1..20: mol_type = other DNA
cctgggctcaagcaatcctc

SEQ ID NO: 1516 - DNA, 20 bp, synthetic construct
  source 1..20: mol_type = other DNA
gagccagggtttcaccatgt

SEQ ID NO: 1517 - DNA, 20 bp, synthetic construct
  source 1..20: mol_type = other DNA
gagaatcgattgaacccagg

SEQ ID NO: 1518 - DNA, 20 bp, synthetic construct
  source 1..20: mol_type = other DNA
ggtttcaacatatgaatttt

SEQ ID NO: 1519 - DNA, 20 bp, synthetic construct
  source 1..20: mol_type = other DNA
ggagtgcagtggtgcaatat

SEQ ID NO: 1520 - DNA, 20 bp, synthetic construct
  source 1..20: mol_type = other DNA
atacaaaaattagccggcca

SEQ ID NO: 1521 - DNA, 20 bp, synthetic construct
  source 1..20: mol_type = other DNA
cccagttactcaggaagctg

SEQ ID NO: 1522 - DNA, 20 bp, synthetic construct
  source 1..20: mol_type = other DNA
caaaaattagccggccatgg

SEQ ID NO: 1523 - DNA, 20 bp, synthetic construct
  source 1..20: mol_type = other DNA
aaataaaaattagccaggtg

SEQ ID NO: 1524 - DNA, 20 bp, synthetic construct
  source 1..20: mol_type = other DNA
caggtgcataccaccacacc

SEQ ID NO: 1525 - DNA, 20 bp, synthetic construct
  source 1..20: mol_type = other DNA
gcactttgggaagctgagac

SEQ ID NO: 1526 - DNA, 20 bp, synthetic construct
  source 1..20: mol_type = other DNA
cctcagcttcctgagtaact

SEQ ID NO: 1527 - DNA, 20 bp, synthetic construct
  source 1..20: mol_type = other DNA
ctttgggagggcgaggtggg

SEQ ID NO: 1528 - DNA, 20 bp, synthetic construct
  source 1..20: mol_type = other DNA
gctacttaagaggctgaggc

SEQ ID NO: 1529 - DNA, 20 bp, synthetic construct
  source 1..20: mol_type = other DNA
tgggaagactgcttgagccc

SEQ ID NO: 1530 - DNA, 20 bp, synthetic construct
  source 1..20: mol_type = other DNA
gtttcaacatatgaattttg

SEQ ID NO: 1531 - DNA, 20 bp, synthetic construct
  source 1..20: mol_type = other DNA
gcctcagcctcttaagtagc

SEQ ID NO: 1532 - DNA, 20 bp, synthetic construct
  source 1..20: mol_type = other DNA
caaggcaggtggatcaccta

SEQ ID NO: 1533 - DNA, 20 bp, synthetic construct
  source 1..20: mol_type = other DNA
ttcaacatatgaattttggg

SEQ ID NO: 1534 - DNA, 20 bp, synthetic construct
  source 1..20: mol_type = other DNA
ctgccactgtactccagcct

SEQ ID NO: 1535 - DNA, 20 bp, synthetic construct
  source 1..20: mol_type = other DNA
ttgtgttttttgtagagaca

SEQ ID NO: 1536 - DNA, 20 bp, synthetic construct
  source 1..20: mol_type = other DNA
tttcaccaccttggccaggc

SEQ ID NO: 1537 - DNA, 20 bp, synthetic construct
  source 1..20: mol_type = other DNA
tctcgctcagtcacccaggc

SEQ ID NO: 1538 - DNA, 20 bp, synthetic construct
  source 1..20: mol_type = other DNA
tgcatttcccaagaccaccc

SEQ ID NO: 1539 - DNA, 20 bp, synthetic construct
  source 1..20: mol_type = other DNA
tctttctttcttttttgaga

SEQ ID NO: 1540 - DNA, 20 bp, synthetic construct
  source 1..20: mol_type = other DNA
cctcagtcttccaagtagct

SEQ ID NO: 1541 - DNA, 20 bp, synthetic construct
  source 1..20: mol_type = other DNA
ctttgggaggacaaggcagg

SEQ ID NO: 1542 - DNA, 20 bp, synthetic construct
  source 1..20: mol_type = other DNA
gagtgcaaggttttattgag

SEQ ID NO: 1543 - DNA, 20 bp, synthetic construct
  source 1..20: mol_type = other DNA
gtaatctcagcactttggga

SEQ ID NO: 1544 - DNA, 20 bp, synthetic construct
  source 1..20: mol_type = other DNA
caaacattagccaggcatgg

SEQ ID NO: 1545 - DNA, 20 bp, synthetic construct
  source 1..20: mol_type = other DNA
tgagaccagcctgggcagca

SEQ ID NO: 1546 - DNA, 20 bp, synthetic construct
  source 1..20: mol_type = other DNA
atacaaacattagccaggca

SEQ ID NO: 1547 - DNA, 20 bp, synthetic construct
  source 1..20: mol_type = other DNA
tattattattattttgagac

SEQ ID NO: 1548 - DNA, 20 bp, synthetic construct
  source 1..20: mol_type = other DNA
cccagctacttaagaggctg

SEQ ID NO: 1549 - DNA, 20 bp, synthetic construct
  source 1..20: mol_type = other DNA
tcacccacactggagtgcag

SEQ ID NO: 1550 - DNA, 20 bp, synthetic construct
  source 1..20: mol_type = other DNA
gcactttgggagggcgaggt

SEQ ID NO: 1551 - DNA, 20 bp, synthetic construct
  source 1..20: mol_type = other DNA
gagacagggttttgctatgt

SEQ ID NO: 1552 - DNA, 20 bp, synthetic construct
  source 1..20: mol_type = other DNA
cctcagcctcttaagtagct

SEQ ID NO: 1553 - DNA, 20 bp, synthetic construct
  source 1..20: mol_type = other DNA
agggttttgctatgttggcc

SEQ ID NO: 1554 - DNA, 20 bp, synthetic construct
  source 1..20: mol_type = other DNA
tttgtgttttttgtagagac

SEQ ID NO: 1555 - DNA, 20 bp, synthetic construct
  source 1..20: mol_type = other DNA
tttcaacatatgaattttgg

SEQ ID NO: 1556 - DNA, 20 bp, synthetic construct
  source 1..20: mol_type = other DNA
ggggcctttgggaggtgatt

SEQ ID NO: 1557 - DNA, 20 bp, synthetic construct
  source 1..20: mol_type = other DNA
agtggaattgctgggtcata

SEQ ID NO: 1558 - DNA, 20 bp, synthetic construct
  source 1..20: mol_type = other DNA
cactgtagcctcaacctccc

SEQ ID NO: 1559 - DNA, 20 bp, synthetic construct
  source 1..20: mol_type = other DNA
caaaaaacacaaaaattagc

SEQ ID NO: 1560 - DNA, 20 bp, synthetic construct
  source 1..20: mol_type = other DNA
ggagtacaatggcgcgatct

SEQ ID NO: 1561 - DNA, 20 bp, synthetic construct
  source 1..20: mol_type = other DNA
ttttttttttcttttgagac

SEQ ID NO: 1562 - DNA, 20 bp, synthetic construct
  source 1..20: mol_type = other DNA
tggccaacatggtgaaaccc

SEQ ID NO: 1563 - DNA, 20 bp, synthetic construct
  source 1..20: mol_type = other DNA
cgcttgaacccggaaggcag

SEQ ID NO: 1564 - DNA, 20 bp, synthetic construct
  source 1..20: mol_type = other DNA
gagacggggtttcaccaggt

SEQ ID NO: 1565 - DNA, 20 bp, synthetic construct
  source 1..20: mol_type = other DNA
tggggcctgtcgtggggtgg

SEQ ID NO: 1566 - DNA, 20 bp, synthetic construct
  source 1..20: mol_type = other DNA
tctcagcttcccaaagtgct

SEQ ID NO: 1567 - DNA, 20 bp, synthetic construct
  source 1..20: mol_type = other DNA
ctggggcctgtcgtggggtg

SEQ ID NO: 1568 - DNA, 20 bp, synthetic construct
  source 1..20: mol_type = other DNA
cgtttgaacctgggaggcgg

SEQ ID NO: 1569 - DNA, 20 bp, synthetic construct
  source 1..20: mol_type = other DNA
cactggggcctgtcgtgggg

SEQ ID NO: 1570 - DNA, 20 bp, synthetic construct
  source 1..20: mol_type = other DNA
aactcctgacctcaagtgat

SEQ ID NO: 1571 - DNA, 20 bp, synthetic construct
  source 1..20: mol_type = other DNA
caggctggtcttgagctcct

SEQ ID NO: 1572 - DNA, 20 bp, synthetic construct
  source 1..20: mol_type = other DNA
cgcgccattgtactccagcc

SEQ ID NO: 1573 - DNA, 20 bp, synthetic construct
  source 1..20: mol_type = other DNA
cgcttgaacccgggagatgg

SEQ ID NO: 1574 - DNA, 20 bp, synthetic construct
  source 1..20: mol_type = other DNA
agagtcttactctgtcgccc

SEQ ID NO: 1575 - DNA, 20 bp, synthetic construct
  source 1..20: mol_type = other DNA
aagaggctgaggcaggagaa

SEQ ID NO: 1576 - DNA, 20 bp, synthetic construct
  source 1..20: mol_type = other DNA
aaaaaacacaaaaattagct

SEQ ID NO: 1577 - DNA, 20 bp, synthetic construct
  source 1..20: mol_type = other DNA
actggggcctgtcgtggggt

SEQ ID NO: 1578 - DNA, 20 bp, synthetic construct
  source 1..20: mol_type = other DNA
gcactttgggaggacaaggc

SEQ ID NO: 1579 - DNA, 20 bp, synthetic construct
  source 1..20: mol_type = other DNA
gccttggcctcctgaagtgc

SEQ ID NO: 1580 - DNA, 20 bp, synthetic construct
  source 1..20: mol_type = other DNA
gccttgtcctcccaaagtgc

SEQ ID NO: 1581 - DNA, 20 bp, synthetic construct
  source 1..20: mol_type = other DNA
agcactttgggagggcgagg

SEQ ID NO: 1582 - DNA, 20 bp, synthetic construct
  source 1..20: mol_type = other DNA
acacactggggcctgtcgtg

SEQ ID NO: 1583 - DNA, 20 bp, synthetic construct
  source 1..20: mol_type = other DNA
tggctgtaatcccagctact

SEQ ID NO: 1584 - DNA, 20 bp, synthetic construct
  source 1..20: mol_type = other DNA
caggagaatcacttgaaacc

SEQ ID NO: 1585 - DNA, 20 bp, synthetic construct
  source 1..20: mol_type = other DNA
tgcctgtcatcccagctact

SEQ ID NO: 1586 - DNA, 20 bp, synthetic construct
  source 1..20: mol_type = other DNA
cacacactggggcctgtcgt

SEQ ID NO: 1587 - DNA, 20 bp, synthetic construct
  source 1..20: mol_type = other DNA
caggtggatcacctaaggtc

SEQ ID NO: 1588 - DNA, 20 bp, synthetic construct
  source 1..20: mol_type = other DNA
tgttgttgttgtttttgaga

SEQ ID NO: 1589 - DNA, 20 bp, synthetic construct
  source 1..20: mol_type = other DNA
tgcctctaatcccagctact

SEQ ID NO: 1590 - DNA, 20 bp, synthetic construct
  source 1..20: mol_type = other DNA
ggagtgcagtggagcgatct

SEQ ID NO: 1591 - DNA, 20 bp, synthetic construct
  source 1..20: mol_type = other DNA
cccagcacttcaggaggcca

SEQ ID NO: 1592 - DNA, 20 bp, synthetic construct
  source 1..20: mol_type = other DNA
ggctgtaatcccagctactc

SEQ ID NO: 1593 - DNA, 20 bp, synthetic construct
  source 1..20: mol_type = other DNA
tgcttgagcccaggaggtcg

SEQ ID NO: 1594 - DNA, 20 bp, synthetic construct
  source 1..20: mol_type = other DNA
tttgtatttttgtagagacg

SEQ ID NO: 1595 - DNA, 20 bp, synthetic construct
  source 1..20: mol_type = other DNA
ggagtcttactctgttgccc

SEQ ID NO: 1596 - DNA, 20 bp, synthetic construct
  source 1..20: mol_type = other DNA
ccttggcctcctgaagtgct

SEQ ID NO: 1597 - DNA, 20 bp, synthetic construct
  source 1..20: mol_type = other DNA
caggagctcaagaccagcct

SEQ ID NO: 1598 - DNA, 20 bp, synthetic construct
  source 1..20: mol_type = other DNA
ccaggctggtcttgagctcc

SEQ ID NO: 1599 - DNA, 20 bp, synthetic construct
  source 1..20: mol_type = other DNA
ccaggagctcaagaccagcc

SEQ ID NO: 1600 - DNA, 20 bp, synthetic construct
  source 1..20: mol_type = other DNA
gaatttcactcttgttgccc

SEQ ID NO: 1601 - DNA, 20 bp, synthetic construct
  source 1..20: mol_type = other DNA
cgatagtttgctcagaatga

SEQ ID NO: 1602 - DNA, 20 bp, synthetic construct
  source 1..20: mol_type = other DNA
cccagcactttgggaggaca

SEQ ID NO: 1603 - DNA, 20 bp, synthetic construct
  source 1..20: mol_type = other DNA
attctgagcaaactatcgca

SEQ ID NO: 1604 - DNA, 20 bp, synthetic construct
  source 1..20: mol_type = other DNA
ctaaagatacaaaaattagc

SEQ ID NO: 1605 - DNA, 20 bp, synthetic construct
  source 1..20: mol_type = other DNA
ccttgtcctcccaaagtgct

SEQ ID NO: 1606 - DNA, 20 bp, synthetic construct
  source 1..20: mol_type = other DNA
cgctccactgcactccagcc

SEQ ID NO: 1607 - DNA, 20 bp, synthetic construct
  source 1..20: mol_type = other DNA
gcgccattgtactccagcct

SEQ ID NO: 1608 - DNA, 20 bp, synthetic construct
  source 1..20: mol_type = other DNA
atctcaaaaaaaaaaaaaaa

SEQ ID NO: 1609 - DNA, 20 bp, synthetic construct
  source 1..20: mol_type = other DNA
gagcggggagggatagcatt

SEQ ID NO: 1610 - DNA, 20 bp, synthetic construct
  source 1..20: mol_type = other DNA
tcaagcgattctcctgcctc

SEQ ID NO: 1611 - DNA, 20 bp, synthetic construct
  source 1..20: mol_type = other DNA
ttaatccagtctatcactga

SEQ ID NO: 1612 - DNA, 20 bp, synthetic construct
  source 1..20: mol_type = other DNA
gagaatcgcttgaacccgga

SEQ ID NO: 1613 - DNA, 20 bp, synthetic construct
  source 1..20: mol_type = other DNA
gcctctaatcccagctactc

SEQ ID NO: 1614 - DNA, 20 bp, synthetic construct
  source 1..20: mol_type = other DNA
ttgtaattttagtagagacg

SEQ ID NO: 1615 - DNA, 20 bp, synthetic construct
  source 1..20: mol_type = other DNA
aatcgcttgaacccgggaga

SEQ ID NO: 1616 - DNA, 20 bp, synthetic construct
  source 1..20: mol_type = other DNA
ttttgctatgttggccaggc

SEQ ID NO: 1617 - DNA, 20 bp, synthetic construct
  source 1..20: mol_type = other DNA
taaaaatacaaacattagcc

SEQ ID NO: 1618 - DNA, 20 bp, synthetic construct
  source 1..20: mol_type = other DNA
tcacacactggggcctgtcg

SEQ ID NO: 1619 - DNA, 20 bp, synthetic construct
  source 1..20: mol_type = other DNA
ccatgttggtcaggctggtc

SEQ ID NO: 1620 - DNA, 20 bp, synthetic construct
  source 1..20: mol_type = other DNA
ccagaccagcctgaccaaca

SEQ ID NO: 1621 - DNA, 20 bp, synthetic construct
  source 1..20: mol_type = other DNA
tgactgtaatcccagcactt

SEQ ID NO: 1622 - DNA, 20 bp, synthetic construct
  source 1..20: mol_type = other DNA
caggctggtctcaaattcct

SEQ ID NO: 1623 - DNA, 20 bp, synthetic construct
  source 1..20: mol_type = other DNA
tgggaggatcccttgagccc

SEQ ID NO: 1624 - DNA, 20 bp, synthetic construct
  source 1..20: mol_type = other DNA
tgcaccactgcactccagtc

SEQ ID NO: 1625 - DNA, 20 bp, synthetic construct
  source 1..20: mol_type = other DNA
tcttactctgtcgcccaggc

SEQ ID NO: 1626 - DNA, 20 bp, synthetic construct
  source 1..20: mol_type = other DNA
tctcactctgttgcccagac

SEQ ID NO: 1627 - DNA, 20 bp, synthetic construct
  source 1..20: mol_type = other DNA
aactgcttgaacccaggagg

SEQ ID NO: 1628 - DNA, 20 bp, synthetic construct
  source 1..20: mol_type = other DNA
acacaaaaattagctgggca

SEQ ID NO: 1629 - DNA, 20 bp, synthetic construct
  source 1..20: mol_type = other DNA
ggattacaggcgtgagccac

SEQ ID NO: 1630 - DNA, 20 bp, synthetic construct
  source 1..20: mol_type = other DNA
gccgaggtgggcggatcatg

SEQ ID NO: 1631 - DNA, 20 bp, synthetic construct
  source 1..20: mol_type = other DNA
cagaagtttgagaccagcct

SEQ ID NO: 1632 - DNA, 20 bp, synthetic construct
  source 1..20: mol_type = other DNA
gaggtctcactatgttgccc

SEQ ID NO: 1633 - DNA, 20 bp, synthetic construct
  source 1..20: mol_type = other DNA
ttttgtatttttgtagagac

SEQ ID NO: 1634 - DNA, 20 bp, synthetic construct
  source 1..20: mol_type = other DNA
tcgggagttcgagaccagcc

SEQ ID NO: 1635 - DNA, 20 bp, synthetic construct
  source 1..20: mol_type = other DNA
tgcctgtaaccccagcactt

SEQ ID NO: 1636 - DNA, 20 bp, synthetic construct
  source 1..20: mol_type = other DNA
tttgtaattttagtagagac

SEQ ID NO: 1637 - DNA, 20 bp, synthetic construct
  source 1..20: mol_type = other DNA
gctccactgcactccagcct

SEQ ID NO: 1638 - DNA, 20 bp, synthetic construct
  source 1..20: mol_type = other DNA
gcaggcagatcacctgaggt

SEQ ID NO: 1639 - DNA, 20 bp, synthetic construct
  source 1..20: mol_type = other DNA
tcctgagtaactgggattac

SEQ ID NO: 1640 - DNA, 20 bp, synthetic construct
  source 1..20: mol_type = other DNA
cttggcctcccaaagtgctg

SEQ ID NO: 1641 - DNA, 20 bp, synthetic construct
  source 1..20: mol_type = other DNA
caggtgtgtgccaccacacc

SEQ ID NO: 1642 - DNA, 20 bp, synthetic construct
  source 1..20: mol_type = other DNA
ccaggctggtctcaaattcc

SEQ ID NO: 1643 - DNA, 20 bp, synthetic construct
  source 1..20: mol_type = other DNA
ccaggaatttgagaccagcc

SEQ ID NO: 1644 - DNA, 20 bp, synthetic construct
  source 1..20: mol_type = other DNA
tttttgtatttttgtagaga

SEQ ID NO: 1645 - DNA, 20 bp, synthetic construct
  source 1..20: mol_type = other DNA
tgtaatcccagcacttcagg

SEQ ID NO: 1646 - DNA, 20 bp, synthetic construct
  source 1..20: mol_type = other DNA
gagaactgcttgaacccagg

SEQ ID NO: 1647 - DNA, 20 bp, synthetic construct
  source 1..20: mol_type = other DNA
caggaatttgagaccagcct

SEQ ID NO: 1648 - DNA, 20 bp, synthetic construct
  source 1..20: mol_type = other DNA
tcagaagtttgagaccagcc

SEQ ID NO: 1649 - DNA, 20 bp, synthetic construct
  source 1..20: mol_type = other DNA
gactgtaatcccagcacttt

SEQ ID NO: 1650 - DNA, 20 bp, synthetic construct
  source 1..20: mol_type = other DNA
gcaccactgcactccagtct

SEQ ID NO: 1651 - DNA, 20 bp, synthetic construct
  source 1..20: mol_type = other DNA
taaaaattagccaggtgtgg

SEQ ID NO: 1652 - DNA, 20 bp, synthetic construct
  source 1..20: mol_type = other DNA
ttttgtaattttagtagaga

SEQ ID NO: 1653 - DNA, 20 bp, synthetic construct
  source 1..20: mol_type = other DNA
taaaaatacaaaaatcagct

SEQ ID NO: 1654 - DNA, 20 bp, synthetic construct
  source 1..20: mol_type = other DNA
gcctcggtctcccaaagtgc

SEQ ID NO: 1655 - DNA, 20 bp, synthetic construct
  source 1..20: mol_type = other DNA
gcactttgggagaccgaggc

SEQ ID NO: 1656 - DNA, 20 bp, synthetic construct
  source 1..20: mol_type = other DNA
agcactttgggagaccgagg

SEQ ID NO: 1657 - DNA, 20 bp, synthetic construct
  source 1..20: mol_type = other DNA
acctcatgatccgcccacct

SEQ ID NO: 1658 - DNA, 20 bp, synthetic construct
  source 1..20: mol_type = other DNA
cactgcaacctctgccttcc

SEQ ID NO: 1659 - DNA, 20 bp, synthetic construct
  source 1..20: mol_type = other DNA
tcttactctgttgcccaggc

SEQ ID NO: 1660 - DNA, 20 bp, synthetic construct
  source 1..20: mol_type = other DNA
cactgcagcctcgacctcct

SEQ ID NO: 1661 - DNA, 20 bp, synthetic construct
  source 1..20: mol_type = other DNA
aaaaaaaaaaaaaaaaagcc

SEQ ID NO: 1662 - DNA, 20 bp, synthetic construct
  source 1..20: mol_type = other DNA
ggggtttctccatgttggcc

SEQ ID NO: 1663 - DNA, 20 bp, synthetic construct
  source 1..20: mol_type = other DNA
caggagaactgcttgaaccc

SEQ ID NO: 1664 - DNA, 20 bp, synthetic construct
  source 1..20: mol_type = other DNA
ggtgggcggatcatgaggtc

SEQ ID NO: 1665 - DNA, 20 bp, synthetic construct
  source 1..20: mol_type = other DNA
ttgcccaggctggagtacaa

SEQ ID NO: 1666 - DNA, 20 bp, synthetic construct
  source 1..20: mol_type = other DNA
tcactgcagcctcgacctcc

SEQ ID NO: 1667 - DNA, 20 bp, synthetic construct
  source 1..20: mol_type = other DNA
tcactgcaacctctgccttc

SEQ ID NO: 1668 - DNA, 20 bp, synthetic construct
  source 1..20: mol_type = other DNA
gggattacaggcgtgagcca

SEQ ID NO: 1669 - DNA, 20 bp, synthetic construct
  source 1..20: mol_type = other DNA
gcctgtagtcccagctacta

SEQ ID NO: 1670 - DNA, 20 bp, synthetic construct
  source 1..20: mol_type = other DNA
ctaaaaatacaaaaatcagc

SEQ ID NO: 1671 - DNA, 20 bp, synthetic construct
  source 1..20: mol_type = other DNA
caggcgcccgccaccacacc

SEQ ID NO: 1672 - DNA, 20 bp, synthetic construct
  source 1..20: mol_type = other DNA
cccagcactttgggagaccg

SEQ ID NO: 1673 - DNA, 20 bp, synthetic construct
  source 1..20: mol_type = other DNA
ttgcccagactggagtgcag

SEQ ID NO: 1674 - DNA, 20 bp, synthetic construct
  source 1..20: mol_type = other DNA
caaaaaaaaaaaaaaaaaaa

SEQ ID NO: 1675 - DNA, 20 bp, synthetic construct
  source 1..20: mol_type = other DNA
acactttgggaggctgaggt

SEQ ID NO: 1676 - DNA, 20 bp, synthetic construct
  source 1..20: mol_type = other DNA
cctcggtctcccaaagtgct

SEQ ID NO: 1677 - DNA, 20 bp, synthetic construct
  source 1..20: mol_type = other DNA
tcactgcagccttgaactcc

SEQ ID NO: 1678 - DNA, 20 bp, synthetic construct
  source 1..20: mol_type = other DNA
aaaaaaaaaaaaaaaaaaga

SEQ ID NO: 1679 - DNA, 20 bp, synthetic construct
  source 1..20: mol_type = other DNA
gcctgtaaccccagcacttt

SEQ ID NO: 1680 - DNA, 20 bp, synthetic construct
  source 1..20: mol_type = other DNA
attattatactttaagttct

SEQ ID NO: 1681 - DNA, 20 bp, synthetic construct
  source 1..20: mol_type = other DNA
ttgtatttttagtagagact

SEQ ID NO: 1682 - DNA, 20 bp, synthetic construct
  source 1..20: mol_type = other DNA
tcgcccaggctggagtacag

SEQ ID NO: 1683 - DNA, 20 bp, synthetic construct
  source 1..20: mol_type = other DNA
cgaggcaggcagatcacctg

SEQ ID NO: 1684 - DNA, 20 bp, synthetic construct
  source 1..20: mol_type = other DNA
cgaggcaggcagatcacctg

SEQ ID NO: 1685 - DNA, 20 bp, synthetic construct
  source 1..20: mol_type = other DNA
tccctagtagctgggactac

SEQ ID NO: 1686 - DNA, 20 bp, synthetic construct
  source 1..20: mol_type = other DNA
tttctccatgttggccaggc

SEQ ID NO: 1687 - DNA, 20 bp, synthetic construct
  source 1..20: mol_type = other DNA
aatacaaaattagccaggca

SEQ ID NO: 1688 - DNA, 20 bp, synthetic construct
  source 1..20: mol_type = other DNA
tgtagtcccagctactaggg

SEQ ID NO: 1689 - DNA, 20 bp, synthetic construct
  source 1..20: mol_type = other DNA
ggagtgcaatggcgcaatct

SEQ ID NO: 1690 - DNA, 20 bp, synthetic construct
  source 1..20: mol_type = other DNA
acaaaattagccaggcatgg

SEQ ID NO: 1691 - DNA, 20 bp, synthetic construct
  source 1..20: mol_type = other DNA
aatggtgtgaacccgggagg

SEQ ID NO: 1692 - DNA, 20 bp, synthetic construct
  source 1..20: mol_type = other DNA
ttctcctgcctcagcctccc

SEQ ID NO: 1693 - DNA, 20 bp, synthetic construct
  source 1..20: mol_type = other DNA
tcaggagttccagaccagcc

SEQ ID NO: 1694 - DNA, 20 bp, synthetic construct
  source 1..20: mol_type = other DNA
tcccaaagtgctggggttac

SEQ ID NO: 1695 - DNA, 20 bp, synthetic construct
  source 1..20: mol_type = other DNA
tgtaaccccagcactttggg

SEQ ID NO: 1696 - DNA, 20 bp, synthetic construct
  source 1..20: mol_type = other DNA
aaaaaaaaaaaaaaaaaaag

SEQ ID NO: 1697 - DNA, 20 bp, synthetic construct
  source 1..20: mol_type = other DNA
tacaaaaaattagccgggtg

SEQ ID NO: 1698 - DNA, 20 bp, synthetic construct
  source 1..20: mol_type = other DNA
caggtgtgagccaccacacc

SEQ ID NO: 1699 - DNA, 20 bp, synthetic construct
  source 1..20: mol_type = other DNA
aacactttgggaggctgagg

SEQ ID NO: 1700 - DNA, 20 bp, synthetic construct
  source 1..20: mol_type = other DNA
ggtctcgaactcccgacctc

SEQ ID NO: 1701 - DNA, 20 bp, synthetic construct
  source 1..20: mol_type = other DNA
tacaaaaaattagccaggtg

SEQ ID NO: 1702 - DNA, 20 bp, synthetic construct
  source 1..20: mol_type = other DNA
caggcatgagccaccgcacc

SEQ ID NO: 1703 - DNA, 20 bp, synthetic construct
  source 1..20: mol_type = other DNA
tgcgccattgcactccagcc

SEQ ID NO: 1704 - DNA, 20 bp, synthetic construct
  source 1..20: mol_type = other DNA
ttattatactttaagttcta

SEQ ID NO: 1705 - DNA, 20 bp, synthetic construct
  source 1..20: mol_type = other DNA
gagaatggtgtgaacccggg

SEQ ID NO: 1706 - DNA, 20 bp, synthetic construct
  source 1..20: mol_type = other DNA
aattagccgggtgtggtggc

SEQ ID NO: 1707 - DNA, 20 bp, synthetic construct
  source 1..20: mol_type = other DNA
caccgcatgttctcactcat

SEQ ID NO: 1708 - DNA, 20 bp, synthetic construct
  source 1..20: mol_type = other DNA
caaggcaggtggatcacctg

SEQ ID NO: 1709 - DNA, 20 bp, synthetic construct
  source 1..20: mol_type = other DNA
cgcatgttctcactcatagg

SEQ ID NO: 1710 - DNA, 20 bp, synthetic construct
  source 1..20: mol_type = other DNA
aaattagccgggtgtggtgg

SEQ ID NO: 1711 - DNA, 20 bp, synthetic construct
  source 1..20: mol_type = other DNA
cgcctgtaatctcagcactt

SEQ ID NO: 1712 - DNA, 20 bp, synthetic construct
  source 1..20: mol_type = other DNA
ctcaggtgatctgcctgcct

SEQ ID NO: 1713 - DNA, 20 bp, synthetic construct
  source 1..20: mol_type = other DNA
ctcaggtgatctgcctgcct

SEQ ID NO: 1714 - DNA, 20 bp, synthetic construct
  source 1..20: mol_type = other DNA
gctactagggaggctgaggc

SEQ ID NO: 1715 - DNA, 20 bp, synthetic construct
  source 1..20: mol_type = other DNA
tgcttgaacccaggaggcgg

SEQ ID NO: 1716 - DNA, 20 bp, synthetic construct
  source 1..20: mol_type = other DNA
gcctcagcctccctagtagc

SEQ ID NO: 1717 - DNA, 20 bp, synthetic construct
  source 1..20: mol_type = other DNA
gagacggggtttctccatgt

SEQ ID NO: 1718 - DNA, 20 bp, synthetic construct
  source 1..20: mol_type = other DNA
gagtgagaacatgcggtgtt

SEQ ID NO: 1719 - DNA, 20 bp, synthetic construct
  source 1..20: mol_type = other DNA
ggtacatgtgcacaacgtgc

SEQ ID NO: 1720 - DNA, 20 bp, synthetic construct
  source 1..20: mol_type = other DNA
aaaaaattagccgggtgtgg

SEQ ID NO: 1721 - DNA, 20 bp, synthetic construct
  source 1..20: mol_type = other DNA
cctagcactttgggaggccg

SEQ ID NO: 1722 - DNA, 20 bp, synthetic construct
  source 1..20: mol_type = other DNA
caggcgtgagccactgtgcc

SEQ ID NO: 1723 - DNA, 20 bp, synthetic construct
  source 1..20: mol_type = other DNA
cccagctactagggaggctg

SEQ ID NO: 1724 - DNA, 20 bp, synthetic construct
  source 1..20: mol_type = other DNA
cccagctactagggaggctg

SEQ ID NO: 1725 - DNA, 20 bp, synthetic construct
  source 1..20: mol_type = other DNA
cgcctgtaatcctagcactt

SEQ ID NO: 1726 - DNA, 20 bp, synthetic construct
  source 1..20: mol_type = other DNA
tgtagggacatggatgaagc

SEQ ID NO: 1727 - DNA, 20 bp, synthetic construct
  source 1..20: mol_type = other DNA
cctcagcctccctagtagct

SEQ ID NO: 1728 - DNA, 20 bp, synthetic construct
  source 1..20: mol_type = other DNA
cctcagcctccctagtagct

SEQ ID NO: 1729 - DNA, 20 bp, synthetic construct
  source 1..20: mol_type = other DNA
tgcctgtaatcctagcactt

SEQ ID NO: 1730 - DNA, 20 bp, synthetic construct
  source 1..20: mol_type = other DNA
caggcagatcacctgaggtc

SEQ ID NO: 1731 - DNA, 20 bp, synthetic construct
  source 1..20: mol_type = other DNA
caggcagatcacctgaggtc

SEQ ID NO: 1732 - DNA, 20 bp, synthetic construct
  source 1..20: mol_type = other DNA
gcatgttctcactcataggt

SEQ ID NO: 1733 - DNA, 20 bp, synthetic construct
  source 1..20: mol_type = other DNA
cacctatgagtgagaacatg

SEQ ID NO: 1734 - DNA, 20 bp, synthetic construct
  source 1..20: mol_type = other DNA
gcaggagaatggtgtgaacc

SEQ ID NO: 1735 - DNA, 20 bp, synthetic construct
  source 1..20: mol_type = other DNA
caggcatgagccaccatgcc

SEQ ID NO: 1736 - DNA, 20 bp, synthetic construct
  source 1..20: mol_type = other DNA
caggagaatggtgtgaaccc

SEQ ID NO: 1737 - DNA, 20 bp, synthetic construct
  source 1..20: mol_type = other DNA
catgccattgcactccagcc

SEQ ID NO: 1738 - DNA, 20 bp, synthetic construct
  source 1..20: mol_type = other DNA
tctcactatgttgcccaggc

SEQ ID NO: 1739 - DNA, 20 bp, synthetic construct
  source 1..20: mol_type = other DNA
atgccattgcactccagcct

SEQ ID NO: 1740 - DNA, 20 bp, synthetic construct
  source 1..20: mol_type = other DNA
aaaaaattagccaggtgtgg

SEQ ID NO: 1741 - DNA, 20 bp, synthetic construct
  source 1..20: mol_type = other DNA
tatgtatacatgtgccatgt

SEQ ID NO: 1742 - DNA, 20 bp, synthetic construct
  source 1..20: mol_type = other DNA
ggggtttcactgtgttagcc

SEQ ID NO: 1743 - DNA, 20 bp, synthetic construct
  source 1..20: mol_type = other DNA
gagtttcactcttgttgccc

SEQ ID NO: 1744 - DNA, 20 bp, synthetic construct
  source 1..20: mol_type = other DNA
ctcaggtgatccacctgcct

SEQ ID NO: 1745 - DNA, 20 bp, synthetic construct
  source 1..20: mol_type = other DNA
ttcactcttgttgcccaggc

SEQ ID NO: 1746 - DNA, 20 bp, synthetic construct
  source 1..20: mol_type = other DNA
ttcactcttgttgcccaggc

SEQ ID NO: 1747 - DNA, 20 bp, synthetic construct
  source 1..20: mol_type = other DNA
gcctgtaatctcagcacttt

SEQ ID NO: 1748 - DNA, 20 bp, synthetic construct
  source 1..20: mol_type = other DNA
gcgccattgcactccagcct

SEQ ID NO: 1749 - DNA, 20 bp, synthetic construct
  source 1..20: mol_type = other DNA
ggggtttcaccatgttggtc

SEQ ID NO: 1750 - DNA, 20 bp, synthetic construct
  source 1..20: mol_type = other DNA
acctcagcctcctgagtagc

SEQ ID NO: 1751 - DNA, 20 bp, synthetic construct
  source 1..20: mol_type = other DNA
agctactcaggaggctgagg

SEQ ID NO: 1752 - DNA, 20 bp, synthetic construct
  source 1..20: mol_type = other DNA
agctactcaggaggctgagg

SEQ ID NO: 1753 - DNA, 20 bp, synthetic construct
  source 1..20: mol_type = other DNA
gctactcaggaggctgaggt

SEQ ID NO: 1754 - DNA, 20 bp, synthetic construct
  source 1..20: mol_type = other DNA
tttttttttttttttgagac

SEQ ID NO: 1755 - DNA, 20 bp, synthetic construct
  source 1..20: mol_type = other DNA
tttttttttttttttgagac

SEQ ID NO: 1756 - DNA, 20 bp, synthetic construct
  source 1..20: mol_type = other DNA
ttttttttttttttgagaca

SEQ ID NO: 1757 - DNA, 20 bp, synthetic construct
  source 1..20: mol_type = other DNA
ttttttttttttttgagaca

SEQ ID NO: 1758 - DNA, 20 bp, synthetic construct
  source 1..20: mol_type = other DNA
tttcactgtgttagccagga

SEQ ID NO: 1759 - DNA, 20 bp, synthetic construct
  source 1..20: mol_type = other DNA
tcacccaggctggagtgcaa

SEQ ID NO: 1760 - DNA, 20 bp, synthetic construct
  source 1..20: mol_type = other DNA
acctgtaatcccagctactt

SEQ ID NO: 1761 - DNA, 20 bp, synthetic construct
  source 1..20: mol_type = other DNA
ctaaaaatacaaaattagcc

SEQ ID NO: 1762 - DNA, 20 bp, synthetic construct
  source 1..20: mol_type = other DNA
gcctgtaatcctagcacttt

SEQ ID NO: 1763 - DNA, 20 bp, synthetic construct
  source 1..20: mol_type = other DNA
gcctgtaatcctagcacttt

SEQ ID NO: 1764 - DNA, 20 bp, synthetic construct
  source 1..20: mol_type = other DNA
ggagtgcagtggcgtgatct

SEQ ID NO: 1765 - DNA, 20 bp, synthetic construct
  source 1..20: mol_type = other DNA
ggagtgcagtggcgtgatct

SEQ ID NO: 1766 - DNA, 20 bp, synthetic construct
  source 1..20: mol_type = other DNA
tcccaaagtgctgagattac

SEQ ID NO: 1767 - DNA, 20 bp, synthetic construct
  source 1..20: mol_type = other DNA
tgtaatctcagcactttggg

SEQ ID NO: 1768 - DNA, 20 bp, synthetic construct
  source 1..20: mol_type = other DNA
tagactggattaagaaaatg

SEQ ID NO: 1769 - DNA, 20 bp, synthetic construct
  source 1..20: mol_type = other DNA
tttcaccatgttggtcaggc

SEQ ID NO: 1770 - DNA, 20 bp, synthetic construct
  source 1..20: mol_type = other DNA
cactgcaacctccgcctcct

SEQ ID NO: 1771 - DNA, 20 bp, synthetic construct
  source 1..20: mol_type = other DNA
ggagtctcgctctgtcgccc

SEQ ID NO: 1772 - DNA, 20 bp, synthetic construct
  source 1..20: mol_type = other DNA
aatgtggcacatatacacca

SEQ ID NO: 1773 - DNA, 20 bp, synthetic construct
  source 1..20: mol_type = other DNA
acgccactgcactccagcct

SEQ ID NO: 1774 - DNA, 20 bp, synthetic construct
  source 1..20: mol_type = other DNA
tcccaaagtgctaggattac

SEQ ID NO: 1775 - DNA, 20 bp, synthetic construct
  source 1..20: mol_type = other DNA
tcccaaagtgctaggattac

SEQ ID NO: 1776 - DNA, 20 bp, synthetic construct
  source 1..20: mol_type = other DNA
ggagtgcagtggcgcgatct

SEQ ID NO: 1777 - DNA, 20 bp, synthetic construct
  source 1..20: mol_type = other DNA
cacgccactgcactccagcc

SEQ ID NO: 1778 - DNA, 20 bp, synthetic construct
  source 1..20: mol_type = other DNA
tgtaatcctagcactttggg

SEQ ID NO: 1779 - DNA, 20 bp, synthetic construct
  source 1..20: mol_type = other DNA
caaaaattagctgggcatgg

SEQ ID NO: 1780 - DNA, 20 bp, synthetic construct
  source 1..20: mol_type = other DNA
ctttgggaggctgaggtggg

SEQ ID NO: 1781 - DNA, 20 bp, synthetic construct
  source 1..20: mol_type = other DNA
ggtctcaaactcctgacctc

SEQ ID NO: 1782 - DNA, 20 bp, synthetic construct
  source 1..20: mol_type = other DNA
gagaatcgcttgaacccagg

SEQ ID NO: 1783 - DNA, 20 bp, synthetic construct
  source 1..20: mol_type = other DNA
caggcgtgagccaccgcgcc

SEQ ID NO: 1784 - DNA, 20 bp, synthetic construct
  source 1..20: mol_type = other DNA
ctttgggaggccaaggcagg

SEQ ID NO: 1785 - DNA, 20 bp, synthetic construct
  source 1..20: mol_type = other DNA
ggtcttgaactcctgacctc

SEQ ID NO: 1786 - DNA, 20 bp, synthetic construct
  source 1..20: mol_type = other DNA
tctcgctctgtcgcccaggc

SEQ ID NO: 1787 - DNA, 20 bp, synthetic construct
  source 1..20: mol_type = other DNA
ctttgggaggccgaggtggg

SEQ ID NO: 1788 - DNA, 20 bp, synthetic construct
  source 1..20: mol_type = other DNA
cacctgtaatcccagctact

SEQ ID NO: 1789 - DNA, 20 bp, synthetic construct
  source 1..20: mol_type = other DNA
cgcgccactgcactccagcc

SEQ ID NO: 1790 - DNA, 20 bp, synthetic construct
  source 1..20: mol_type = other DNA
acctgtagtcccagctactc

SEQ ID NO: 1791 - DNA, 20 bp, synthetic construct
  source 1..20: mol_type = other DNA
agggtttcaccatgttggcc

SEQ ID NO: 1792 - DNA, 20 bp, synthetic construct
  source 1..20: mol_type = other DNA
cactgcaagctccgcctccc

SEQ ID NO: 1793 - DNA, 20 bp, synthetic construct
  source 1..20: mol_type = other DNA
tgcctgtagtcccagctact

SEQ ID NO: 1794 - DNA, 20 bp, synthetic construct
  source 1..20: mol_type = other DNA
ggtctcgaactcctgacctc

SEQ ID NO: 1795 - DNA, 20 bp, synthetic construct
  source 1..20: mol_type = other DNA
tcactgcaagctccgcctcc

SEQ ID NO: 1796 - DNA, 20 bp, synthetic construct
  source 1..20: mol_type = other DNA
cactgcaacctccgcctccc

SEQ ID NO: 1797 - DNA, 20 bp, synthetic construct
  source 1..20: mol_type = other DNA
gcactttgggaggccgaggt

SEQ ID NO: 1798 - DNA, 20 bp, synthetic construct
  source 1..20: mol_type = other DNA
tcactgcaacctccgcctcc

SEQ ID NO: 1799 - DNA, 20 bp, synthetic construct
  source 1..20: mol_type = other DNA
caagaccagcctggccaaca

SEQ ID NO: 1800 - DNA, 20 bp, synthetic construct
  source 1..20: mol_type = other DNA
gagatggggtttcaccatgt

SEQ ID NO: 1801 - DNA, 20 bp, synthetic construct
  source 1..20: mol_type = other DNA
tgtagtcccagctactcagg

SEQ ID NO: 1802 - DNA, 20 bp, synthetic construct
  source 1..20: mol_type = other DNA
tgtagtcccagctactcagg

SEQ ID NO: 1803 - DNA, 20 bp, synthetic construct
  source 1..20: mol_type = other DNA
tcctgagtagctgggactac

SEQ ID NO: 1804 - DNA, 20 bp, synthetic construct
  source 1..20: mol_type = other DNA
tcctgagtagctgggactac

SEQ ID NO: 1805 - DNA, 20 bp, synthetic construct
  source 1..20: mol_type = other DNA
caggagaatcgcttgaaccc

SEQ ID NO: 1806 - DNA, 20 bp, synthetic construct
  source 1..20: mol_type = other DNA
caggagaatcgcttgaaccc

SEQ ID NO: 1807 - DNA, 20 bp, synthetic construct
  source 1..20: mol_type = other DNA
cgagaccagcctggccaaca

SEQ ID NO: 1808 - DNA, 20 bp, synthetic construct
  source 1..20: mol_type = other DNA
gcaggagaatcgcttgaacc

SEQ ID NO: 1809 - DNA, 20 bp, synthetic construct
  source 1..20: mol_type = other DNA
gcaggagaatcgcttgaacc

SEQ ID NO: 1810 - DNA, 20 bp, synthetic construct
  source 1..20: mol_type = other DNA
tgtaatcccagctactcggg

SEQ ID NO: 1811 - DNA, 20 bp, synthetic construct
  source 1..20: mol_type = other DNA
taaaaatacaaaaaattagc

SEQ ID NO: 1812 - DNA, 20 bp, synthetic construct
  source 1..20: mol_type = other DNA
gcgccactgcactccagcct

SEQ ID NO: 1813 - DNA, 20 bp, synthetic construct
  source 1..20: mol_type = other DNA
tcccaagtagctgggattac

SEQ ID NO: 1814 - DNA, 20 bp, synthetic construct
  source 1..20: mol_type = other DNA
tgtaatcccagctacttggg

SEQ ID NO: 1815 - DNA, 20 bp, synthetic construct
  source 1..20: mol_type = other DNA
tcaggagttcaagaccagcc

SEQ ID NO: 1816 - DNA, 20 bp, synthetic construct
  source 1..20: mol_type = other DNA
tcaggagttcgagaccagcc

SEQ ID NO: 1817 - DNA, 20 bp, synthetic construct
  source 1..20: mol_type = other DNA
tcaggagttcgagaccagcc

SEQ ID NO: 1818 - DNA, 20 bp, synthetic construct
  source 1..20: mol_type = other DNA
aaaaatacaaaaaattagcc

SEQ ID NO: 1819 - DNA, 20 bp, synthetic construct
  source 1..20: mol_type = other DNA
aaaaatacaaaaaattagcc

SEQ ID NO: 1820 - DNA, 20 bp, synthetic construct
  source 1..20: mol_type = other DNA
tcaggagatcgagaccatcc

SEQ ID NO: 1821 - DNA, 20 bp, synthetic construct
  source 1..20: mol_type = other DNA
gccttggcctcccaaagtgc

SEQ ID NO: 1822 - DNA, 20 bp, synthetic construct
  source 1..20: mol_type = other DNA
gccttggcctcccaaagtgc

SEQ ID NO: 1823 - DNA, 20 bp, synthetic construct
  source 1..20: mol_type = other DNA
gcactttgggaggccaaggc

SEQ ID NO: 1824 - DNA, 20 bp, synthetic construct
  source 1..20: mol_type = other DNA
gcactttgggaggccaaggc

SEQ ID NO: 1825 - DNA, 20 bp, synthetic construct
  source 1..20: mol_type = other DNA
gcctcagcctcccaaagtgc

SEQ ID NO: 1826 - DNA, 20 bp, synthetic construct
  source 1..20: mol_type = other DNA
gcactttgggaggctgaggc

SEQ ID NO: 1827 - DNA, 20 bp, synthetic construct
  source 1..20: mol_type = other DNA
agcactttgggaggctgagg

SEQ ID NO: 1828 - DNA, 20 bp, synthetic construct
  source 1..20: mol_type = other DNA
tcgcccaggctggagtgcag

SEQ ID NO: 1829 - DNA, 20 bp, synthetic construct
  source 1..20: mol_type = other DNA
tcgcccaggctggagtgcag

SEQ ID NO: 1830 - DNA, 20 bp, synthetic construct
  source 1..20: mol_type = other DNA
ttgtatttttagtagagaca

SEQ ID NO: 1831 - DNA, 20 bp, synthetic construct
  source 1..20: mol_type = other DNA
ttgtatttttagtagagaca

SEQ ID NO: 1832 - DNA, 20 bp, synthetic construct
  source 1..20: mol_type = other DNA
ttgcccaggctggagtgcag

SEQ ID NO: 1833 - DNA, 20 bp, synthetic construct
  source 1..20: mol_type = other DNA
cacctgtaatcccagcactt

SEQ ID NO: 1834 - DNA, 20 bp, synthetic construct
  source 1..20: mol_type = other DNA
gcctgtagtcccagctactc

SEQ ID NO: 1835 - DNA, 20 bp, synthetic construct
  source 1..20: mol_type = other DNA
acctgtaatcccagcacttt

SEQ ID NO: 1836 - DNA, 20 bp, synthetic construct
  source 1..20: mol_type = other DNA
gctacttgggaggctgaggc

SEQ ID NO: 1837 - DNA, 20 bp, synthetic construct
  source 1..20: mol_type = other DNA
gctactcaggaggctgaggc

SEQ ID NO: 1838 - DNA, 20 bp, synthetic construct
  source 1..20: mol_type = other DNA
cccagcactttgggaggcca

SEQ ID NO: 1839 - DNA, 20 bp, synthetic construct
  source 1..20: mol_type = other DNA
cccagcactttgggaggcca

SEQ ID NO: 1840 - DNA, 20 bp, synthetic construct
  source 1..20: mol_type = other DNA
gcctcagcctcccaagtagc

SEQ ID NO: 1841 - DNA, 20 bp, synthetic construct
  source 1..20: mol_type = other DNA
gcctcggcctcccaaagtgc

SEQ ID NO: 1842 - DNA, 20 bp, synthetic construct
  source 1..20: mol_type = other DNA
gcctcggcctcccaaagtgc

SEQ ID NO: 1843 - DNA, 20 bp, synthetic construct
  source 1..20: mol_type = other DNA
ttgtatttttagtagagatg

SEQ ID NO: 1844 - DNA, 20 bp, synthetic construct
  source 1..20: mol_type = other DNA
ttttttttttttttttgaga

SEQ ID NO: 1845 - DNA, 20 bp, synthetic construct
  source 1..20: mol_type = other DNA
ttttttttttttttttgaga

SEQ ID NO: 1846 - DNA, 20 bp, synthetic construct
  source 1..20: mol_type = other DNA
ccttggcctcccaaagtgct

SEQ ID NO: 1847 - DNA, 20 bp, synthetic construct
  source 1..20: mol_type = other DNA
ccttggcctcccaaagtgct

SEQ ID NO: 1848 - DNA, 20 bp, synthetic construct
  source 1..20: mol_type = other DNA
cccagcactttgggaggctg

SEQ ID NO: 1849 - DNA, 20 bp, synthetic construct
  source 1..20: mol_type = other DNA
gcactttgggaggccgaggc

SEQ ID NO: 1850 - DNA, 20 bp, synthetic construct
  source 1..20: mol_type = other DNA
gcactttgggaggccgaggc

SEQ ID NO: 1851 - DNA, 20 bp, synthetic construct
  source 1..20: mol_type = other DNA
gcctcagcctcctgagtagc

SEQ ID NO: 1852 - DNA, 20 bp, synthetic construct
  source 1..20: mol_type = other DNA
tttgtatttttagtagagat

SEQ ID NO: 1853 - DNA, 20 bp, synthetic construct
  source 1..20: mol_type = other DNA
tttcaccatgttggccaggc

SEQ ID NO: 1854 - DNA, 20 bp, synthetic construct
  source 1..20: mol_type = other DNA
gctactcgggaggctgaggc

SEQ ID NO: 1855 - DNA, 20 bp, synthetic construct
  source 1..20: mol_type = other DNA
agcactttgggaggccgagg

SEQ ID NO: 1856 - DNA, 20 bp, synthetic construct
  source 1..20: mol_type = other DNA
cccagctacttgggaggctg

SEQ ID NO: 1857 - DNA, 20 bp, synthetic construct
  source 1..20: mol_type = other DNA
tgcctgtaatcccagcactt

SEQ ID NO: 1858 - DNA, 20 bp, synthetic construct
  source 1..20: mol_type = other DNA
cctcagcctcccaaagtgct

SEQ ID NO: 1859 - DNA, 20 bp, synthetic construct
  source 1..20: mol_type = other DNA
cctcagcctcccaagtagct

SEQ ID NO: 1860 - DNA, 20 bp, synthetic construct
  source 1..20: mol_type = other DNA
cccagctactcaggaggctg

SEQ ID NO: 1861 - DNA, 20 bp, synthetic construct
  source 1..20: mol_type = other DNA
cccagctactcaggaggctg

SEQ ID NO: 1862 - DNA, 20 bp, synthetic construct
  source 1..20: mol_type = other DNA
gcctcagcctcccgagtagc

SEQ ID NO: 1863 - DNA, 20 bp, synthetic construct
  source 1..20: mol_type = other DNA
cctcagcctcctgagtagct

SEQ ID NO: 1864 - DNA, 20 bp, synthetic construct
  source 1..20: mol_type = other DNA
cctcagcctcctgagtagct

SEQ ID NO: 1865 - DNA, 20 bp, synthetic construct
  source 1..20: mol_type = other DNA
cccagctactcgggaggctg

SEQ ID NO: 1866 - DNA, 20 bp, synthetic construct
  source 1..20: mol_type = other DNA
ttgtatttttagtagagacg

SEQ ID NO: 1867 - DNA, 20 bp, synthetic construct
  source 1..20: mol_type = other DNA
cctcagcctcccgagtagct

SEQ ID NO: 1868 - DNA, 20 bp, synthetic construct
  source 1..20: mol_type = other DNA
cccagcactttgggaggccg

SEQ ID NO: 1869 - DNA, 20 bp, synthetic construct
  source 1..20: mol_type = other DNA
cccagcactttgggaggccg

SEQ ID NO: 1870 - DNA, 20 bp, synthetic construct
  source 1..20: mol_type = other DNA
cctcggcctcccaaagtgct

SEQ ID NO: 1871 - DNA, 20 bp, synthetic construct
  source 1..20: mol_type = other DNA
cctcggcctcccaaagtgct

SEQ ID NO: 1872 - DNA, 20 bp, synthetic construct
  source 1..20: mol_type = other DNA
cctcggcctcccaaagtgct

SEQ ID NO: 1873 - DNA, 20 bp, synthetic construct
  source 1..20: mol_type = other DNA
cgcctgtaatcccagcactt

SEQ ID NO: 1874 - DNA, 20 bp, synthetic construct
  source 1..20: mol_type = other DNA
cgcctgtaatcccagcactt

SEQ ID NO: 1875 - DNA, 20 bp, synthetic construct
  source 1..20: mol_type = other DNA
cgcctgtaatcccagcactt

SEQ ID NO: 1876 - DNA, 20 bp, synthetic construct
  source 1..20: mol_type = other DNA
tttgtatttttagtagagac

SEQ ID NO: 1877 - DNA, 20 bp, synthetic construct
  source 1..20: mol_type = other DNA
tttgtatttttagtagagac

SEQ ID NO: 1878 - DNA, 20 bp, synthetic construct
  source 1..20: mol_type = other DNA
tttgtatttttagtagagac

SEQ ID NO: 1879 - DNA, 20 bp, synthetic construct
  source 1..20: mol_type = other DNA
tttgtatttttagtagagac

SEQ ID NO: 1880 - DNA, 20 bp, synthetic construct
  source 1..20: mol_type = other DNA
ttttgtatttttagtagaga

SEQ ID NO: 1881 - DNA, 20 bp, synthetic construct
  source 1..20: mol_type = other DNA
ttttgtatttttagtagaga

SEQ ID NO: 1882 - DNA, 20 bp, synthetic construct
  source 1..20: mol_type = other DNA
gcctgtaatcccagcacttt

SEQ ID NO: 1883 - DNA, 20 bp, synthetic construct
  source 1..20: mol_type = other DNA
gcctgtaatcccagcacttt

SEQ ID NO: 1884 - DNA, 20 bp, synthetic construct
  source 1..20: mol_type = other DNA
gcctgtaatcccagcacttt

SEQ ID NO: 1885 - DNA, 20 bp, synthetic construct
  source 1..20: mol_type = other DNA
gcctgtaatcccagcacttt

SEQ ID NO: 1886 - DNA, 20 bp, synthetic construct
  source 1..20: mol_type = other DNA
tcccaaagtgctgggattac

SEQ ID NO: 1887 - DNA, 20 bp, synthetic construct
  source 1..20: mol_type = other DNA
tcccaaagtgctgggattac

SEQ ID NO: 1888 - DNA, 20 bp, synthetic construct
  source 1..20: mol_type = other DNA
tcccaaagtgctgggattac

SEQ ID NO: 1889 - DNA, 20 bp, synthetic construct
  source 1..20: mol_type = other DNA
tcccaaagtgctgggattac

SEQ ID NO: 1890 - DNA, 20 bp, synthetic construct
  source 1..20: mol_type = other DNA
tcccaaagtgctgggattac

SEQ ID NO: 1891 - DNA, 20 bp, synthetic construct
  source 1..20: mol_type = other DNA
tgtaatcccagcactttggg

SEQ ID NO: 1892 - DNA, 20 bp, synthetic construct
  source 1..20: mol_type = other DNA
tgtaatcccagcactttggg

SEQ ID NO: 1893 - DNA, 20 bp, synthetic construct
  source 1..20: mol_type = other DNA
tgtaatcccagcactttggg

SEQ ID NO: 1894 - DNA, 20 bp, synthetic construct
  source 1..20: mol_type = other DNA
tgtaatcccagcactttggg

SEQ ID NO: 1895 - DNA, 20 bp, synthetic construct
  source 1..20: mol_type = other DNA
tgtaatcccagcactttggg

SEQ ID NO: 1896 - DNA, 20 bp, synthetic construct
  source 1..20: mol_type = other DNA
acctgagtaataaaaattgt

SEQ ID NO: 1897 - DNA, 20 bp, synthetic construct
  source 1..20: mol_type = other DNA
tccaacaatttttattactc

SEQ ID NO: 1898 - DNA, 20 bp, synthetic construct
  source 1..20: mol_type = other DNA
caacatgccaattagttcac

SEQ ID NO: 1899 - DNA, 20 bp, synthetic construct
  source 1..20: mol_type = other DNA
ttaataacctgtgaactaat

SEQ ID NO: 1900 - DNA, 20 bp, synthetic construct
  source 1..20: mol_type = other DNA
tcacaggttattaatttaaa

SEQ ID NO: 1901 - DNA, 20 bp, synthetic construct
  source 1..20: mol_type = other DNA
tttaaaaggtcactgttgtg

SEQ ID NO: 1902 - DNA, 20 bp, synthetic construct
  source 1..20: mol_type = other DNA
ctttgtcactgtcttgctcc

SEQ ID NO: 1903 - DNA, 20 bp, synthetic construct
  source 1..20: mol_type = other DNA
ctgtcttgctcctggcttcc

SEQ ID NO: 1904 - DNA, 20 bp, synthetic construct
  source 1..20: mol_type = other DNA
cctggcttcctggtttcatg

SEQ ID NO: 1905 - DNA, 20 bp, synthetic construct
  source 1..20: mol_type = other DNA
cctcatgaaaccaggaagcc

SEQ ID NO: 1906 - DNA, 20 bp, synthetic construct
  source 1..20: mol_type = other DNA
agaaggttcctcatgaaacc

SEQ ID NO: 1907 - DNA, 20 bp, synthetic construct
  source 1..20: mol_type = other DNA
aatatcatttgaactttaga

SEQ ID NO: 1908 - DNA, 20 bp, synthetic construct
  source 1..20: mol_type = other DNA
attgaaactcaacagaaaga

SEQ ID NO: 1909 - DNA, 20 bp, synthetic construct
  source 1..20: mol_type = other DNA
aaactcaacagaaagaagga

SEQ ID NO: 1910 - DNA, 20 bp, synthetic construct
  source 1..20: mol_type = other DNA
aactcaacagaaagaaggaa

SEQ ID NO: 1911 - DNA, 20 bp, synthetic construct
  source 1..20: mol_type = other DNA
ttgtttttatagaaactctg

SEQ ID NO: 1912 - DNA, 20 bp, synthetic construct
  source 1..20: mol_type = other DNA
taatgagaagtcatgtttct

SEQ ID NO: 1913 - DNA, 20 bp, synthetic construct
  source 1..20: mol_type = other DNA
tcatgtttcttggaaatttt

SEQ ID NO: 1914 - DNA, 20 bp, synthetic construct
  source 1..20: mol_type = other DNA
tgtttcttggaaattttagg

SEQ ID NO: 1915 - DNA, 20 bp, synthetic construct
  source 1..20: mol_type = other DNA
tagaatttaatattgtaagc

SEQ ID NO: 1916 - DNA, 20 bp, synthetic construct
  source 1..20: mol_type = other DNA
tgtaagccggactattactg

SEQ ID NO: 1917 - DNA, 20 bp, synthetic construct
  source 1..20: mol_type = other DNA
gtaagccggactattactga

SEQ ID NO: 1918 - DNA, 20 bp, synthetic construct
  source 1..20: mol_type = other DNA
cttaaccctcagtaatagtc

SEQ ID NO: 1919 - DNA, 20 bp, synthetic construct
  source 1..20: mol_type = other DNA
cggactattactgagggtta

SEQ ID NO: 1920 - DNA, 20 bp, synthetic construct
  source 1..20: mol_type = other DNA
gaagctattaatagctctgc

SEQ ID NO: 1921 - DNA, 20 bp, synthetic construct
  source 1..20: mol_type = other DNA
aagctattaatagctctgct

SEQ ID NO: 1922 - DNA, 20 bp, synthetic construct
  source 1..20: mol_type = other DNA
tgctgggacaagtgtaaatg

SEQ ID NO: 1923 - DNA, 20 bp, synthetic construct
  source 1..20: mol_type = other DNA
gtgtaaatgaggactgtccc

SEQ ID NO: 1924 - DNA, 20 bp, synthetic construct
  source 1..20: mol_type = other DNA
aggactgtcccaggcaaatc

SEQ ID NO: 1925 - DNA, 20 bp, synthetic construct
  source 1..20: mol_type = other DNA
tcccaggcaaatcaggacaa

SEQ ID NO: 1926 - DNA, 20 bp, synthetic construct
  source 1..20: mol_type = other DNA
cccaggcaaatcaggacaaa

SEQ ID NO: 1927 - DNA, 20 bp, synthetic construct
  source 1..20: mol_type = other DNA
ccctttgtcctgatttgcct

SEQ ID NO: 1928 - DNA, 20 bp, synthetic construct
  source 1..20: mol_type = other DNA
accctttgtcctgatttgcc

SEQ ID NO: 1929 - DNA, 20 bp, synthetic construct
  source 1..20: mol_type = other DNA
gggtcaccctagtttaaata

SEQ ID NO: 1930 - DNA, 20 bp, synthetic construct
  source 1..20: mol_type = other DNA
gctaatccatatttaaacta

SEQ ID NO: 1931 - DNA, 20 bp, synthetic construct
  source 1..20: mol_type = other DNA
tgctaatccatatttaaact

SEQ ID NO: 1932 - DNA, 20 bp, synthetic construct
  source 1..20: mol_type = other DNA
tttaaatatggattagcata

SEQ ID NO: 1933 - DNA, 20 bp, synthetic construct
  source 1..20: mol_type = other DNA
tattagactgcagtggtgct

SEQ ID NO: 1934 - DNA, 20 bp, synthetic construct
  source 1..20: mol_type = other DNA
agacttctattagactgcag

SEQ ID NO: 1935 - DNA, 20 bp, synthetic construct
  source 1..20: mol_type = other DNA
tagggtttattgactttctt

SEQ ID NO: 1936 - DNA, 20 bp, synthetic construct
  source 1..20: mol_type = other DNA
tggaatatattgagtcttta

SEQ ID NO: 1937 - DNA, 20 bp, synthetic construct
  source 1..20: mol_type = other DNA
atggaatatattgagtcttt

SEQ ID NO: 1938 - DNA, 20 bp, synthetic construct
  source 1..20: mol_type = other DNA
atttagaagtttaaaagtga

SEQ ID NO: 1939 - DNA, 20 bp, synthetic construct
  source 1..20: mol_type = other DNA
cacttttaaacttctaaatg

SEQ ID NO: 1940 - DNA, 20 bp, synthetic construct
  source 1..20: mol_type = other DNA
taaacttctaaatgtggccc

SEQ ID NO: 1941 - DNA, 20 bp, synthetic construct
  source 1..20: mol_type = other DNA
cttctaaatgtggccctggc

SEQ ID NO: 1942 - DNA, 20 bp, synthetic construct
  source 1..20: mol_type = other DNA
taagcatattatgcctgcca

SEQ ID NO: 1943 - DNA, 20 bp, synthetic construct
  source 1..20: mol_type = other DNA
ttaagcatattatgcctgcc

SEQ ID NO: 1944 - DNA, 20 bp, synthetic construct
  source 1..20: mol_type = other DNA
aggcataatatgcttaaata

SEQ ID NO: 1945 - DNA, 20 bp, synthetic construct
  source 1..20: mol_type = other DNA
agagagtattatgtctaaga

SEQ ID NO: 1946 - DNA, 20 bp, synthetic construct
  source 1..20: mol_type = other DNA
gggcactagagaggtaagag

SEQ ID NO: 1947 - DNA, 20 bp, synthetic construct
  source 1..20: mol_type = other DNA
tgaattgatgggcactagag

SEQ ID NO: 1948 - DNA, 20 bp, synthetic construct
  source 1..20: mol_type = other DNA
aaaaggaattctgaattgat

SEQ ID NO: 1949 - DNA, 20 bp, synthetic construct
  source 1..20: mol_type = other DNA
taaaaggaattctgaattga

SEQ ID NO: 1950 - DNA, 20 bp, synthetic construct
  source 1..20: mol_type = other DNA
ttgaaagtataaactttaaa

SEQ ID NO: 1951 - DNA, 20 bp, synthetic construct
  source 1..20: mol_type = other DNA
tactttcaaatattaaaaat

SEQ ID NO: 1952 - DNA, 20 bp, synthetic construct
  source 1..20: mol_type = other DNA
aaatattaaaaattggttga

SEQ ID NO: 1953 - DNA, 20 bp, synthetic construct
  source 1..20: mol_type = other DNA
aatattaaaaattggttgaa

SEQ ID NO: 1954 - DNA, 20 bp, synthetic construct
  source 1..20: mol_type = other DNA
ttaaaaattggttgaagggt

SEQ ID NO: 1955 - DNA, 20 bp, synthetic construct
  source 1..20: mol_type = other DNA
taaaaattggttgaagggtt

SEQ ID NO: 1956 - DNA, 20 bp, synthetic construct
  source 1..20: mol_type = other DNA
aaaaattggttgaagggttg

SEQ ID NO: 1957 - DNA, 20 bp, synthetic construct
  source 1..20: mol_type = other DNA
tggttgaagggttggggatg

SEQ ID NO: 1958 - DNA, 20 bp, synthetic construct
  source 1..20: mol_type = other DNA
gggttggggatgtggctcag

SEQ ID NO: 1959 - DNA, 20 bp, synthetic construct
  source 1..20: mol_type = other DNA
gactcatgaaggctgggcag

SEQ ID NO: 1960 - DNA, 20 bp, synthetic construct
  source 1..20: mol_type = other DNA
ggactcatgaaggctgggca

SEQ ID NO: 1961 - DNA, 20 bp, synthetic construct
  source 1..20: mol_type = other DNA
gggactcatgaaggctgggc

SEQ ID NO: 1962 - DNA, 20 bp, synthetic construct
  source 1..20: mol_type = other DNA
ctcagggactcatgaaggct

SEQ ID NO: 1963 - DNA, 20 bp, synthetic construct
  source 1..20: mol_type = other DNA
actcagggactcatgaaggc

SEQ ID NO: 1964 - DNA, 20 bp, synthetic construct
  source 1..20: mol_type = other DNA
tttaactcagggactcatga

SEQ ID NO: 1965 - DNA, 20 bp, synthetic construct
  source 1..20: mol_type = other DNA
gcttctgggaatttaactca

SEQ ID NO: 1966 - DNA, 20 bp, synthetic construct
  source 1..20: mol_type = other DNA
tgcttctgggaatttaactc

SEQ ID NO: 1967 - DNA, 20 bp, synthetic construct
  source 1..20: mol_type = other DNA
gtttgtcttatactgcttct

SEQ ID NO: 1968 - DNA, 20 bp, synthetic construct
  source 1..20: mol_type = other DNA
tgtttgtcttatactgcttc

SEQ ID NO: 1969 - DNA, 20 bp, synthetic construct
  source 1..20: mol_type = other DNA
accttacttcatccattttc

SEQ ID NO: 1970 - DNA, 20 bp, synthetic construct
  source 1..20: mol_type = other DNA
gccagaaaatggatgaagta

SEQ ID NO: 1971 - DNA, 20 bp, synthetic construct
  source 1..20: mol_type = other DNA
tgtgtagctatgccagaaaa

SEQ ID NO: 1972 - DNA, 20 bp, synthetic construct
  source 1..20: mol_type = other DNA
catacctgcaatcctagttc

SEQ ID NO: 1973 - DNA, 20 bp, synthetic construct
  source 1..20: mol_type = other DNA
ttgtccagaactaggattgc

SEQ ID NO: 1974 - DNA, 20 bp, synthetic construct
  source 1..20: mol_type = other DNA
gcttgaatttgtccagaact

SEQ ID NO: 1975 - DNA, 20 bp, synthetic construct
  source 1..20: mol_type = other DNA
agttctggacaaattcaagc

SEQ ID NO: 1976 - DNA, 20 bp, synthetic construct
  source 1..20: mol_type = other DNA
aatgccaacctcagctactt

SEQ ID NO: 1977 - DNA, 20 bp, synthetic construct
  source 1..20: mol_type = other DNA
caaacctaagtagctgaggt

SEQ ID NO: 1978 - DNA, 20 bp, synthetic construct
  source 1..20: mol_type = other DNA
caacctcagctacttaggtt

SEQ ID NO: 1979 - DNA, 20 bp, synthetic construct
  source 1..20: mol_type = other DNA
aacctcagctacttaggttt

SEQ ID NO: 1980 - DNA, 20 bp, synthetic construct
  source 1..20: mol_type = other DNA
agcccaaacctaagtagctg

SEQ ID NO: 1981 - DNA, 20 bp, synthetic construct
  source 1..20: mol_type = other DNA
ctgagaccctgtcttaacat

SEQ ID NO: 1982 - DNA, 20 bp, synthetic construct
  source 1..20: mol_type = other DNA
tgagaccctgtcttaacatt

SEQ ID NO: 1983 - DNA, 20 bp, synthetic construct
  source 1..20: mol_type = other DNA
gagaccctgtcttaacattg

SEQ ID NO: 1984 - DNA, 20 bp, synthetic construct
  source 1..20: mol_type = other DNA
agaccctgtcttaacattgg

SEQ ID NO: 1985 - DNA, 20 bp, synthetic construct
  source 1..20: mol_type = other DNA
tctcccccaatgttaagaca

SEQ ID NO: 1986 - DNA, 20 bp, synthetic construct
  source 1..20: mol_type = other DNA
ctctcccccaatgttaagac

SEQ ID NO: 1987 - DNA, 20 bp, synthetic construct
  source 1..20: mol_type = other DNA
ttaacattgggggagagcct

SEQ ID NO: 1988 - DNA, 20 bp, synthetic construct
  source 1..20: mol_type = other DNA
attgggggagagcctaggct

SEQ ID NO: 1989 - DNA, 20 bp, synthetic construct
  source 1..20: mol_type = other DNA
tgtatagctcagcctagcct

SEQ ID NO: 1990 - DNA, 20 bp, synthetic construct
  source 1..20: mol_type = other DNA
ctatacagtaagcctctgtc

SEQ ID NO: 1991 - DNA, 20 bp, synthetic construct
  source 1..20: mol_type = other DNA
tatacagtaagcctctgtct

SEQ ID NO: 1992 - DNA, 20 bp, synthetic construct
  source 1..20: mol_type = other DNA
cagtaagcctctgtctggga

SEQ ID NO: 1993 - DNA, 20 bp, synthetic construct
  source 1..20: mol_type = other DNA
taagcctctgtctgggaagg

SEQ ID NO: 1994 - DNA, 20 bp, synthetic construct
  source 1..20: mol_type = other DNA
aagcctctgtctgggaagga

SEQ ID NO: 1995 - DNA, 20 bp, synthetic construct
  source 1..20: mol_type = other DNA
tttccctccttcccagacag

SEQ ID NO: 1996 - DNA, 20 bp, synthetic construct
  source 1..20: mol_type = other DNA
tgtctgggaaggagggaaaa

SEQ ID NO: 1997 - DNA, 20 bp, synthetic construct
  source 1..20: mol_type = other DNA
tgggaaggagggaaaaagga

SEQ ID NO: 1998 - DNA, 20 bp, synthetic construct
  source 1..20: mol_type = other DNA
gaaaaaggaaggaaagacat

SEQ ID NO: 1999 - DNA, 20 bp, synthetic construct
  source 1..20: mol_type = other DNA
gacattggttgaatgacttg

SEQ ID NO: 2000 - DNA, 20 bp, synthetic construct
  source 1..20: mol_type = other DNA
acattggttgaatgacttgt

SEQ ID NO: 2001 - DNA, 20 bp, synthetic construct
  source 1..20: mol_type = other DNA
actgtatgtttagagtgttc

SEQ ID NO: 2002 - DNA, 20 bp, synthetic construct
  source 1..20: mol_type = other DNA
ctgtatgtttagagtgttca

SEQ ID NO: 2003 - DNA, 20 bp, synthetic construct
  source 1..20: mol_type = other DNA
gtttagagtgttcagggaaa

SEQ ID NO: 2004 - DNA, 20 bp, synthetic construct
  source 1..20: mol_type = other DNA
tagagtgttcagggaaaagg

SEQ ID NO: 2005 - DNA, 20 bp, synthetic construct
  source 1..20: mol_type = other DNA
aggtcatttgcagagcagag

SEQ ID NO: 2006 - DNA, 20 bp, synthetic construct
  source 1..20: mol_type = other DNA
attcgtcttatctgagtggc

SEQ ID NO: 2007 - DNA, 20 bp, synthetic construct
  source 1..20: mol_type = other DNA
gtgtattcgtcttatctgag

SEQ ID NO: 2008 - DNA, 20 bp, synthetic construct
  source 1..20: mol_type = other DNA
catgaatatagaagaaacag

SEQ ID NO: 2009 - DNA, 20 bp, synthetic construct
  source 1..20: mol_type = other DNA
aataaaagacacaagactgc

SEQ ID NO: 2010 - DNA, 20 bp, synthetic construct
  source 1..20: mol_type = other DNA
ctaataatatttctagtgtc

SEQ ID NO: 2011 - DNA, 20 bp, synthetic construct
  source 1..20: mol_type = other DNA
cttgagattttattttcaca

SEQ ID NO: 2012 - DNA, 20 bp, synthetic construct
  source 1..20: mol_type = other DNA
cttgtgaaaataaaatctca

SEQ ID NO: 2013 - DNA, 20 bp, synthetic construct
  source 1..20: mol_type = other DNA
aataaaatctcaaggtcata

SEQ ID NO: 2014 - DNA, 20 bp, synthetic construct
  source 1..20: mol_type = other DNA
tacggcaaacacaaagaaac

SEQ ID NO: 2015 - DNA, 20 bp, synthetic construct
  source 1..20: mol_type = other DNA
gtcttcagacactccagaag

SEQ ID NO: 2016 - DNA, 20 bp, synthetic construct
  source 1..20: mol_type = other DNA
tcttcagacactccagaaga

SEQ ID NO: 2017 - DNA, 20 bp, synthetic construct
  source 1..20: mol_type = other DNA
cgagatctgatgccctcttc

SEQ ID NO: 2018 - DNA, 20 bp, synthetic construct
  source 1..20: mol_type = other DNA
gagggcatcagatctcgtta

SEQ ID NO: 2019 - DNA, 20 bp, synthetic construct
  source 1..20: mol_type = other DNA
gcatcagatctcgttacgga

SEQ ID NO: 2020 - DNA, 20 bp, synthetic construct
  source 1..20: mol_type = other DNA
gatggttgtgagccaccatg

SEQ ID NO: 2021 - DNA, 20 bp, synthetic construct
  source 1..20: mol_type = other DNA
gtgagccaccatgtggttgc

SEQ ID NO: 2022 - DNA, 20 bp, synthetic construct
  source 1..20: mol_type = other DNA
tgagccaccatgtggttgct

SEQ ID NO: 2023 - DNA, 20 bp, synthetic construct
  source 1..20: mol_type = other DNA
aaatcccagcaaccacatgg

SEQ ID NO: 2024 - DNA, 20 bp, synthetic construct
  source 1..20: mol_type = other DNA
ttcaaatcccagcaaccaca

SEQ ID NO: 2025 - DNA, 20 bp, synthetic construct
  source 1..20: mol_type = other DNA
ggatttgaacttcagacctt

SEQ ID NO: 2026 - DNA, 20 bp, synthetic construct
  source 1..20: mol_type = other DNA
cagaccttcggaagagcagt

SEQ ID NO: 2027 - DNA, 20 bp, synthetic construct
  source 1..20: mol_type = other DNA
agaccttcggaagagcagtc

SEQ ID NO: 2028 - DNA, 20 bp, synthetic construct
  source 1..20: mol_type = other DNA
gcacccgactgctcttccga

SEQ ID NO: 2029 - DNA, 20 bp, synthetic construct
  source 1..20: mol_type = other DNA
ggctggtgagatggctcagt

SEQ ID NO: 2030 - DNA, 20 bp, synthetic construct
  source 1..20: mol_type = other DNA
gggctggtgagatggctcag

SEQ ID NO: 2031 - DNA, 20 bp, synthetic construct
  source 1..20: mol_type = other DNA
tgagccatctcaccagcccc

SEQ ID NO: 2032 - DNA, 20 bp, synthetic construct
  source 1..20: mol_type = other DNA
aaaacctggggctggtgaga

SEQ ID NO: 2033 - DNA, 20 bp, synthetic construct
  source 1..20: mol_type = other DNA
agaaaaaaaaaacctggggc

SEQ ID NO: 2034 - DNA, 20 bp, synthetic construct
  source 1..20: mol_type = other DNA
actaagaaaaaaaaaacctg

SEQ ID NO: 2035 - DNA, 20 bp, synthetic construct
  source 1..20: mol_type = other DNA
aactaagaaaaaaaaaacct

SEQ ID NO: 2036 - DNA, 20 bp, synthetic construct
  source 1..20: mol_type = other DNA
caactaagaaaaaaaaaacc

SEQ ID NO: 2037 - DNA, 20 bp, synthetic construct
  source 1..20: mol_type = other DNA
tattgttattcttttgagac

SEQ ID NO: 2038 - DNA, 20 bp, synthetic construct
  source 1..20: mol_type = other DNA
aggatcccacactgaaactc

SEQ ID NO: 2039 - DNA, 20 bp, synthetic construct
  source 1..20: mol_type = other DNA
gctagcctgagtttcagtgt

SEQ ID NO: 2040 - DNA, 20 bp, synthetic construct
  source 1..20: mol_type = other DNA
ggctagcctgagtttcagtg

SEQ ID NO: 2041 - DNA, 20 bp, synthetic construct
  source 1..20: mol_type = other DNA
ggctagccttcaatttccta

SEQ ID NO: 2042 - DNA, 20 bp, synthetic construct
  source 1..20: mol_type = other DNA
tcaaatccataggaaattga

SEQ ID NO: 2043 - DNA, 20 bp, synthetic construct
  source 1..20: mol_type = other DNA
tgctatgaggtcaaatccat

SEQ ID NO: 2044 - DNA, 20 bp, synthetic construct
  source 1..20: mol_type = other DNA
gaaactggctgactgctatg

SEQ ID NO: 2045 - DNA, 20 bp, synthetic construct
  source 1..20: mol_type = other DNA
agcactcagaaggtggaaac

SEQ ID NO: 2046 - DNA, 20 bp, synthetic construct
  source 1..20: mol_type = other DNA
aaatcttagcactcagaagg

SEQ ID NO: 2047 - DNA, 20 bp, synthetic construct
  source 1..20: mol_type = other DNA
ttgaaatcttagcactcaga

SEQ ID NO: 2048 - DNA, 20 bp, synthetic construct
  source 1..20: mol_type = other DNA
ggaattgggtgtggtggctc

SEQ ID NO: 2049 - DNA, 20 bp, synthetic construct
  source 1..20: mol_type = other DNA
atcttaggaattgggtgtgg

SEQ ID NO: 2050 - DNA, 20 bp, synthetic construct
  source 1..20: mol_type = other DNA
catatcttaggaattgggtg

SEQ ID NO: 2051 - DNA, 20 bp, synthetic construct
  source 1..20: mol_type = other DNA
aaaaacatatcttaggaatt

SEQ ID NO: 2052 - DNA, 20 bp, synthetic construct
  source 1..20: mol_type = other DNA
taaaaacatatcttaggaat

SEQ ID NO: 2053 - DNA, 20 bp, synthetic construct
  source 1..20: mol_type = other DNA
cttgcttaaaaacatatctt

SEQ ID NO: 2054 - DNA, 20 bp, synthetic construct
  source 1..20: mol_type = other DNA
ctaagatatgtttttaagca

SEQ ID NO: 2055 - DNA, 20 bp, synthetic construct
  source 1..20: mol_type = other DNA
atgtttttaagcaaggttat

SEQ ID NO: 2056 - DNA, 20 bp, synthetic construct
  source 1..20: mol_type = other DNA
cacgtcattgcaaagggtta

SEQ ID NO: 2057 - DNA, 20 bp, synthetic construct
  source 1..20: mol_type = other DNA
accctttgcaatgacgtgtc

SEQ ID NO: 2058 - DNA, 20 bp, synthetic construct
  source 1..20: mol_type = other DNA
tcctgacacgtcattgcaaa

SEQ ID NO: 2059 - DNA, 20 bp, synthetic construct
  source 1..20: mol_type = other DNA
ttcctgacacgtcattgcaa

SEQ ID NO: 2060 - DNA, 20 bp, synthetic construct
  source 1..20: mol_type = other DNA
gacaactggaaaaaaaaaaa

SEQ ID NO: 2061 - DNA, 20 bp, synthetic construct
  source 1..20: mol_type = other DNA
tttttttttttccagttgtc

SEQ ID NO: 2062 - DNA, 20 bp, synthetic construct
  source 1..20: mol_type = other DNA
ttttttccagttgtcaggcc

SEQ ID NO: 2063 - DNA, 20 bp, synthetic construct
  source 1..20: mol_type = other DNA
ccagttgtcaggcctggcaa

SEQ ID NO: 2064 - DNA, 20 bp, synthetic construct
  source 1..20: mol_type = other DNA
ccattgccaggcctgacaac

SEQ ID NO: 2065 - DNA, 20 bp, synthetic construct
  source 1..20: mol_type = other DNA
caggcctggcaatggagccc

SEQ ID NO: 2066 - DNA, 20 bp, synthetic construct
  source 1..20: mol_type = other DNA
aggcctggcaatggagccca

SEQ ID NO: 2067 - DNA, 20 bp, synthetic construct
  source 1..20: mol_type = other DNA
gggccctgggctccattgcc

SEQ ID NO: 2068 - DNA, 20 bp, synthetic construct
  source 1..20: mol_type = other DNA
tttagcaagcacagggccct

SEQ ID NO: 2069 - DNA, 20 bp, synthetic construct
  source 1..20: mol_type = other DNA
gtttagcaagcacagggccc

SEQ ID NO: 2070 - DNA, 20 bp, synthetic construct
  source 1..20: mol_type = other DNA
gccctgtgcttgctaaacga

SEQ ID NO: 2071 - DNA, 20 bp, synthetic construct
  source 1..20: mol_type = other DNA
gccatcgtttagcaagcaca

SEQ ID NO: 2072 - DNA, 20 bp, synthetic construct
  source 1..20: mol_type = other DNA
agccatcgtttagcaagcac

SEQ ID NO: 2073 - DNA, 20 bp, synthetic construct
  source 1..20: mol_type = other DNA
gctgggtatatataacttag

SEQ ID NO: 2074 - DNA, 20 bp, synthetic construct
  source 1..20: mol_type = other DNA
agctgggtatatataactta

SEQ ID NO: 2075 - DNA, 20 bp, synthetic construct
  source 1..20: mol_type = other DNA
aagctgggtatatataactt

SEQ ID NO: 2076 - DNA, 20 bp, synthetic construct
  source 1..20: mol_type = other DNA
atatatacccagcttatccc

SEQ ID NO: 2077 - DNA, 20 bp, synthetic construct
  source 1..20: mol_type = other DNA
gaaagatcctgggataagct

SEQ ID NO: 2078 - DNA, 20 bp, synthetic construct
  source 1..20: mol_type = other DNA
agaaagatcctgggataagc

SEQ ID NO: 2079 - DNA, 20 bp, synthetic construct
  source 1..20: mol_type = other DNA
gaaagtctgagaaagatcct

SEQ ID NO: 2080 - DNA, 20 bp, synthetic construct
  source 1..20: mol_type = other DNA
agaaagtctgagaaagatcc

SEQ ID NO: 2081 - DNA, 20 bp, synthetic construct
  source 1..20: mol_type = other DNA
ctatcgatgttgcttctctt

SEQ ID NO: 2082 - DNA, 20 bp, synthetic construct
  source 1..20: mol_type = other DNA
ctttttgtgagaaaagagca

SEQ ID NO: 2083 - DNA, 20 bp, synthetic construct
  source 1..20: mol_type = other DNA
tctaagcaagaacccttgtc

SEQ ID NO: 2084 - DNA, 20 bp, synthetic construct
  source 1..20: mol_type = other DNA
atctctctgactccagacaa

SEQ ID NO: 2085 - DNA, 20 bp, synthetic construct
  source 1..20: mol_type = other DNA
tatctctctgactccagaca

SEQ ID NO: 2086 - DNA, 20 bp, synthetic construct
  source 1..20: mol_type = other DNA
gtcagagagatagcttagtc

SEQ ID NO: 2087 - DNA, 20 bp, synthetic construct
  source 1..20: mol_type = other DNA
tttaaacaagaaaagttctg

SEQ ID NO: 2088 - DNA, 20 bp, synthetic construct
  source 1..20: mol_type = other DNA
ttttaaacaagaaaagttct

SEQ ID NO: 2089 - DNA, 20 bp, synthetic construct
  source 1..20: mol_type = other DNA
tttttaaacaagaaaagttc

SEQ ID NO: 2090 - DNA, 20 bp, synthetic construct
  source 1..20: mol_type = other DNA
caaacaaacaaacaaaaact

SEQ ID NO: 2091 - DNA, 20 bp, synthetic construct
  source 1..20: mol_type = other DNA
caaaaactaggcatgacagc

SEQ ID NO: 2092 - DNA, 20 bp, synthetic construct
  source 1..20: mol_type = other DNA
actaggcatgacagctggag

SEQ ID NO: 2093 - DNA, 20 bp, synthetic construct
  source 1..20: mol_type = other DNA
aggcatgacagctggagagg

SEQ ID NO: 2094 - DNA, 20 bp, synthetic construct
  source 1..20: mol_type = other DNA
attaacagcacttgttaaag

SEQ ID NO: 2095 - DNA, 20 bp, synthetic construct
  source 1..20: mol_type = other DNA
tgttaaagaggacctcagct

SEQ ID NO: 2096 - DNA, 20 bp, synthetic construct
  source 1..20: mol_type = other DNA
aggacctcagcttggttccc

SEQ ID NO: 2097 - DNA, 20 bp, synthetic construct
  source 1..20: mol_type = other DNA
ggacctcagcttggttccca

SEQ ID NO: 2098 - DNA, 20 bp, synthetic construct
  source 1..20: mol_type = other DNA
gagccctgggaaccaagctg

SEQ ID NO: 2099 - DNA, 20 bp, synthetic construct
  source 1..20: mol_type = other DNA
aactggagttatagagccct

SEQ ID NO: 2100 - DNA, 20 bp, synthetic construct
  source 1..20: mol_type = other DNA
gaactggagttatagagccc

SEQ ID NO: 2101 - DNA, 20 bp, synthetic construct
  source 1..20: mol_type = other DNA
ggctctataactccagttcc

SEQ ID NO: 2102 - DNA, 20 bp, synthetic construct
  source 1..20: mol_type = other DNA
gctctataactccagttcca

SEQ ID NO: 2103 - DNA, 20 bp, synthetic construct
  source 1..20: mol_type = other DNA
gctgtctgaggccctggaac

SEQ ID NO: 2104 - DNA, 20 bp, synthetic construct
  source 1..20: mol_type = other DNA
caggaggctgtctgaggccc

SEQ ID NO: 2105 - DNA, 20 bp, synthetic construct
  source 1..20: mol_type = other DNA
aggctacaggaggctgtctg

SEQ ID NO: 2106 - DNA, 20 bp, synthetic construct
  source 1..20: mol_type = other DNA
atgcatgaagaggctacagg

SEQ ID NO: 2107 - DNA, 20 bp, synthetic construct
  source 1..20: mol_type = other DNA
ctgatgcatgaagaggctac

SEQ ID NO: 2108 - DNA, 20 bp, synthetic construct
  source 1..20: mol_type = other DNA
gcctcttcatgcatcagaca

SEQ ID NO: 2109 - DNA, 20 bp, synthetic construct
  source 1..20: mol_type = other DNA
accatgtctgatgcatgaag

SEQ ID NO: 2110 - DNA, 20 bp, synthetic construct
  source 1..20: mol_type = other DNA
gacatggtccatatgcatgc

SEQ ID NO: 2111 - DNA, 20 bp, synthetic construct
  source 1..20: mol_type = other DNA
gtgtttgacctgcatgcata

SEQ ID NO: 2112 - DNA, 20 bp, synthetic construct
  source 1..20: mol_type = other DNA
aaaaataaaagtctaaaaaa

SEQ ID NO: 2113 - DNA, 20 bp, synthetic construct
  source 1..20: mol_type = other DNA
catgctataatcccagtgct

SEQ ID NO: 2114 - DNA, 20 bp, synthetic construct
  source 1..20: mol_type = other DNA
atgctataatcccagtgcta

SEQ ID NO: 2115 - DNA, 20 bp, synthetic construct
  source 1..20: mol_type = other DNA
ctataatcccagtgctaggg

SEQ ID NO: 2116 - DNA, 20 bp, synthetic construct
  source 1..20: mol_type = other DNA
acatttgcctccctagcact

SEQ ID NO: 2117 - DNA, 20 bp, synthetic construct
  source 1..20: mol_type = other DNA
gacatttgcctccctagcac

SEQ ID NO: 2118 - DNA, 20 bp, synthetic construct
  source 1..20: mol_type = other DNA
gtgctagggaggcaaatgtc

SEQ ID NO: 2119 - DNA, 20 bp, synthetic construct
  source 1..20: mol_type = other DNA
ggcaaatgtctggaccttgt

SEQ ID NO: 2120 - DNA, 20 bp, synthetic construct
  source 1..20: mol_type = other DNA
aatgtctggaccttgtcggt

SEQ ID NO: 2121 - DNA, 20 bp, synthetic construct
  source 1..20: mol_type = other DNA
gactgactggccgaccgaca

SEQ ID NO: 2122 - DNA, 20 bp, synthetic construct
  source 1..20: mol_type = other DNA
tgactggctggctgactgac

SEQ ID NO: 2123 - DNA, 20 bp, synthetic construct
  source 1..20: mol_type = other DNA
gctaggctagactgactggc

SEQ ID NO: 2124 - DNA, 20 bp, synthetic construct
  source 1..20: mol_type = other DNA
ctatgctaggctagactgac

SEQ ID NO: 2125 - DNA, 20 bp, synthetic construct
  source 1..20: mol_type = other DNA
ctagcctagcatagcctact

SEQ ID NO: 2126 - DNA, 20 bp, synthetic construct
  source 1..20: mol_type = other DNA
cacacctagtaggctatgct

SEQ ID NO: 2127 - DNA, 20 bp, synthetic construct
  source 1..20: mol_type = other DNA
tgggctggagcacacctagt

SEQ ID NO: 2128 - DNA, 20 bp, synthetic construct
  source 1..20: mol_type = other DNA
gacaaggtctctcattgggc

SEQ ID NO: 2129 - DNA, 20 bp, synthetic construct
  source 1..20: mol_type = other DNA
tagagacaaggtctctcatt

SEQ ID NO: 2130 - DNA, 20 bp, synthetic construct
  source 1..20: mol_type = other DNA
ttagagacaaggtctctcat

SEQ ID NO: 2131 - DNA, 20 bp, synthetic construct
  source 1..20: mol_type = other DNA
agaccttgtctctaaaaaaa

SEQ ID NO: 2132 - DNA, 20 bp, synthetic construct
  source 1..20: mol_type = other DNA
gaccttgtctctaaaaaaaa

SEQ ID NO: 2133 - DNA, 20 bp, synthetic construct
  source 1..20: mol_type = other DNA
tacccttttttttagagaca

SEQ ID NO: 2134 - DNA, 20 bp, synthetic construct
  source 1..20: mol_type = other DNA
ggtagaaagaaaagacaaaa

SEQ ID NO: 2135 - DNA, 20 bp, synthetic construct
  source 1..20: mol_type = other DNA
gacaaaatggatgtctcctg

SEQ ID NO: 2136 - DNA, 20 bp, synthetic construct
  source 1..20: mol_type = other DNA
ctcctgaggaatgataccca

SEQ ID NO: 2137 - DNA, 20 bp, synthetic construct
  source 1..20: mol_type = other DNA
atccgtgggtatcattcctc

SEQ ID NO: 2138 - DNA, 20 bp, synthetic construct
  source 1..20: mol_type = other DNA
ggacaattgtgggtatccgt

SEQ ID NO: 2139 - DNA, 20 bp, synthetic construct
  source 1..20: mol_type = other DNA
aggacaattgtgggtatccg

SEQ ID NO: 2140 - DNA, 20 bp, synthetic construct
  source 1..20: mol_type = other DNA
ggatacccacaattgtcctc

SEQ ID NO: 2141 - DNA, 20 bp, synthetic construct
  source 1..20: mol_type = other DNA
ggagaccagaggacaattgt

SEQ ID NO: 2142 - DNA, 20 bp, synthetic construct
  source 1..20: mol_type = other DNA
cggagaccagaggacaattg

SEQ ID NO: 2143 - DNA, 20 bp, synthetic construct
  source 1..20: mol_type = other DNA
gtattgcacacggagaccag

SEQ ID NO: 2144 - DNA, 20 bp, synthetic construct
  source 1..20: mol_type = other DNA
acatgggtttgtattgcaca

SEQ ID NO: 2145 - DNA, 20 bp, synthetic construct
  source 1..20: mol_type = other DNA
tgttgcaaatattcagacat

SEQ ID NO: 2146 - DNA, 20 bp, synthetic construct
  source 1..20: mol_type = other DNA
ctgttgcaaatattcagaca

SEQ ID NO: 2147 - DNA, 20 bp, synthetic construct
  source 1..20: mol_type = other DNA
catgtctgaatatttgcaac

SEQ ID NO: 2148 - DNA, 20 bp, synthetic construct
  source 1..20: mol_type = other DNA
atgtctgaatatttgcaaca

SEQ ID NO: 2149 - DNA, 20 bp, synthetic construct
  source 1..20: mol_type = other DNA
agcacagctttactagatga

SEQ ID NO: 2150 - DNA, 20 bp, synthetic construct
  source 1..20: mol_type = other DNA
aagcacagctttactagatg

SEQ ID NO: 2151 - DNA, 20 bp, synthetic construct
  source 1..20: mol_type = other DNA
catctagtaaagctgtgctt

SEQ ID NO: 2152 - DNA, 20 bp, synthetic construct
  source 1..20: mol_type = other DNA
gaaaaataagacagatggga

SEQ ID NO: 2153 - DNA, 20 bp, synthetic construct
  source 1..20: mol_type = other DNA
agaaaaataagacagatggg

SEQ ID NO: 2154 - DNA, 20 bp, synthetic construct
  source 1..20: mol_type = other DNA
agtagaaaaataagacagat

SEQ ID NO: 2155 - DNA, 20 bp, synthetic construct
  source 1..20: mol_type = other DNA
cagtagaaaaataagacaga

SEQ ID NO: 2156 - DNA, 20 bp, synthetic construct
  source 1..20: mol_type = other DNA
catctgtcttatttttctac

SEQ ID NO: 2157 - DNA, 20 bp, synthetic construct
  source 1..20: mol_type = other DNA
atttttctactggtgtgcta

SEQ ID NO: 2158 - DNA, 20 bp, synthetic construct
  source 1..20: mol_type = other DNA
gtgctaaggcaccatgacca

SEQ ID NO: 2159 - DNA, 20 bp, synthetic construct
  source 1..20: mol_type = other DNA
tctctaagttgccttggtca

SEQ ID NO: 2160 - DNA, 20 bp, synthetic construct
  source 1..20: mol_type = other DNA
tcttcttctctaagttgcct

SEQ ID NO: 2161 - DNA, 20 bp, synthetic construct
  source 1..20: mol_type = other DNA
gaagaagaaacagtttattg

SEQ ID NO: 2162 - DNA, 20 bp, synthetic construct
  source 1..20: mol_type = other DNA
aagaagaaacagtttattga

SEQ ID NO: 2163 - DNA, 20 bp, synthetic construct
  source 1..20: mol_type = other DNA
ttgagggtttatagttatag

SEQ ID NO: 2164 - DNA, 20 bp, synthetic construct
  source 1..20: mol_type = other DNA
tgagggtttatagttataga

SEQ ID NO: 2165 - DNA, 20 bp, synthetic construct
  source 1..20: mol_type = other DNA
gtttatagttatagagggta

SEQ ID NO: 2166 - DNA, 20 bp, synthetic construct
  source 1..20: mol_type = other DNA
tagttatagagggtaaggca

SEQ ID NO: 2167 - DNA, 20 bp, synthetic construct
  source 1..20: mol_type = other DNA
tagagggtaaggcaaggact

SEQ ID NO: 2168 - DNA, 20 bp, synthetic construct
  source 1..20: mol_type = other DNA
taaggcaaggacttggtagc

SEQ ID NO: 2169 - DNA, 20 bp, synthetic construct
  source 1..20: mol_type = other DNA
gcaaggacttggtagcaggc

SEQ ID NO: 2170 - DNA, 20 bp, synthetic construct
  source 1..20: mol_type = other DNA
ggacttggtagcaggcaggc

SEQ ID NO: 2171 - DNA, 20 bp, synthetic construct
  source 1..20: mol_type = other DNA
ttggtagcaggcaggcaggc

SEQ ID NO: 2172 - DNA, 20 bp, synthetic construct
  source 1..20: mol_type = other DNA
agcaggcaggcaggcaggca

SEQ ID NO: 2173 - DNA, 20 bp, synthetic construct
  source 1..20: mol_type = other DNA
caggcaggcaggcatggtac

SEQ ID NO: 2174 - DNA, 20 bp, synthetic construct
  source 1..20: mol_type = other DNA
catggtactggtgtagtagc

SEQ ID NO: 2175 - DNA, 20 bp, synthetic construct
  source 1..20: mol_type = other DNA
atggtactggtgtagtagct

SEQ ID NO: 2176 - DNA, 20 bp, synthetic construct
  source 1..20: mol_type = other DNA
ggagcttgtatcttgagaca

SEQ ID NO: 2177 - DNA, 20 bp, synthetic construct
  source 1..20: mol_type = other DNA
aaagctgagagatagctaag

SEQ ID NO: 2178 - DNA, 20 bp, synthetic construct
  source 1..20: mol_type = other DNA
aagctgagagatagctaagt

SEQ ID NO: 2179 - DNA, 20 bp, synthetic construct
  source 1..20: mol_type = other DNA
gagagatagctaagtgggcc

SEQ ID NO: 2180 - DNA, 20 bp, synthetic construct
  source 1..20: mol_type = other DNA
aggtttcaaaagctcacacc

SEQ ID NO: 2181 - DNA, 20 bp, synthetic construct
  source 1..20: mol_type = other DNA
tttcactggggacagctttg

SEQ ID NO: 2182 - DNA, 20 bp, synthetic construct
  source 1..20: mol_type = other DNA
ttgatggaggcatttcactg

SEQ ID NO: 2183 - DNA, 20 bp, synthetic construct
  source 1..20: mol_type = other DNA
gttgatggaggcatttcact

SEQ ID NO: 2184 - DNA, 20 bp, synthetic construct
  source 1..20: mol_type = other DNA
tgttgatggaggcatttcac

SEQ ID NO: 2185 - DNA, 20 bp, synthetic construct
  source 1..20: mol_type = other DNA
gtgaaatgcctccatcaaca

SEQ ID NO: 2186 - DNA, 20 bp, synthetic construct
  source 1..20: mol_type = other DNA
aggtgtggccttgttgatgg

SEQ ID NO: 2187 - DNA, 20 bp, synthetic construct
  source 1..20: mol_type = other DNA
gttaggtgtggccttgttga

SEQ ID NO: 2188 - DNA, 20 bp, synthetic construct
  source 1..20: mol_type = other DNA
tgtttgggaagggttaggtg

SEQ ID NO: 2189 - DNA, 20 bp, synthetic construct
  source 1..20: mol_type = other DNA
agaactgtttgggaagggtt

SEQ ID NO: 2190 - DNA, 20 bp, synthetic construct
  source 1..20: mol_type = other DNA
ttggtagaactgtttgggaa

SEQ ID NO: 2191 - DNA, 20 bp, synthetic construct
  source 1..20: mol_type = other DNA
gttggtagaactgtttggga

SEQ ID NO: 2192 - DNA, 20 bp, synthetic construct
  source 1..20: mol_type = other DNA
tcccaaacagttctaccaac

SEQ ID NO: 2193 - DNA, 20 bp, synthetic construct
  source 1..20: mol_type = other DNA
cccaaacagttctaccaact

SEQ ID NO: 2194 - DNA, 20 bp, synthetic construct
  source 1..20: mol_type = other DNA
cccagttggtagaactgttt

SEQ ID NO: 2195 - DNA, 20 bp, synthetic construct
  source 1..20: mol_type = other DNA
tcccagttggtagaactgtt

SEQ ID NO: 2196 - DNA, 20 bp, synthetic construct
  source 1..20: mol_type = other DNA
atgaatgcttggttcccagt

SEQ ID NO: 2197 - DNA, 20 bp, synthetic construct
  source 1..20: mol_type = other DNA
ctgaggctcatatgaatgct

SEQ ID NO: 2198 - DNA, 20 bp, synthetic construct
  source 1..20: mol_type = other DNA
caagcattcatatgagcctc

SEQ ID NO: 2199 - DNA, 20 bp, synthetic construct
  source 1..20: mol_type = other DNA
aagcattcatatgagcctca

SEQ ID NO: 2200 - DNA, 20 bp, synthetic construct
  source 1..20: mol_type = other DNA
agcattcatatgagcctcag

SEQ ID NO: 2201 - DNA, 20 bp, synthetic construct
  source 1..20: mol_type = other DNA
tgaatgagactgctcccctg

SEQ ID NO: 2202 - DNA, 20 bp, synthetic construct
  source 1..20: mol_type = other DNA
gtactcagtacactgcccca

SEQ ID NO: 2203 - DNA, 20 bp, synthetic construct
  source 1..20: mol_type = other DNA
tactcagtacactgccccat

SEQ ID NO: 2204 - DNA, 20 bp, synthetic construct
  source 1..20: mol_type = other DNA
ttagaggacttctgcccatg

SEQ ID NO: 2205 - DNA, 20 bp, synthetic construct
  source 1..20: mol_type = other DNA
tttagaggacttctgcccat

SEQ ID NO: 2206 - DNA, 20 bp, synthetic construct
  source 1..20: mol_type = other DNA
gtttagaggacttctgccca

SEQ ID NO: 2207 - DNA, 20 bp, synthetic construct
  source 1..20: mol_type = other DNA
atgggcagaagtcctctaaa

SEQ ID NO: 2208 - DNA, 20 bp, synthetic construct
  source 1..20: mol_type = other DNA
acacattagtaaccgtttag

SEQ ID NO: 2209 - DNA, 20 bp, synthetic construct
  source 1..20: mol_type = other DNA
tatccctcaccatacttaga

SEQ ID NO: 2210 - DNA, 20 bp, synthetic construct
  source 1..20: mol_type = other DNA
tttccttctaagtatggtga

SEQ ID NO: 2211 - DNA, 20 bp, synthetic construct
  source 1..20: mol_type = other DNA
gtttccttctaagtatggtg

SEQ ID NO: 2212 - DNA, 20 bp, synthetic construct
  source 1..20: mol_type = other DNA
ggcttgtttccttctaagta

SEQ ID NO: 2213 - DNA, 20 bp, synthetic construct
  source 1..20: mol_type = other DNA
ggaaacaagccatcccaaaa

SEQ ID NO: 2214 - DNA, 20 bp, synthetic construct
  source 1..20: mol_type = other DNA
tcatgctatccattttggga

SEQ ID NO: 2215 - DNA, 20 bp, synthetic construct
  source 1..20: mol_type = other DNA
tgagtcatgctatccatttt

SEQ ID NO: 2216 - DNA, 20 bp, synthetic construct
  source 1..20: mol_type = other DNA
ctgagtcatgctatccattt

SEQ ID NO: 2217 - DNA, 20 bp, synthetic construct
  source 1..20: mol_type = other DNA
ttgctctgggtgaagtacac

SEQ ID NO: 2218 - DNA, 20 bp, synthetic construct
  source 1..20: mol_type = other DNA
tacttcacccagagcaaatg

SEQ ID NO: 2219 - DNA, 20 bp, synthetic construct
  source 1..20: mol_type = other DNA
acccagagcaaatgtggata

SEQ ID NO: 2220 - DNA, 20 bp, synthetic construct
  source 1..20: mol_type = other DNA
accgtatccacatttgctct

SEQ ID NO: 2221 - DNA, 20 bp, synthetic construct
  source 1..20: mol_type = other DNA
caccgtatccacatttgctc

SEQ ID NO: 2222 - DNA, 20 bp, synthetic construct
  source 1..20: mol_type = other DNA
cagagcaaatgtggatacgg

SEQ ID NO: 2223 - DNA, 20 bp, synthetic construct
  source 1..20: mol_type = other DNA
agagcaaatgtggatacggt

SEQ ID NO: 2224 - DNA, 20 bp, synthetic construct
  source 1..20: mol_type = other DNA
gtggatacggtgggaaacag

SEQ ID NO: 2225 - DNA, 20 bp, synthetic construct
  source 1..20: mol_type = other DNA
gggaaacagaggacagtgat

SEQ ID NO: 2226 - DNA, 20 bp, synthetic construct
  source 1..20: mol_type = other DNA
aggacagtgataggacacaa

SEQ ID NO: 2227 - DNA, 20 bp, synthetic construct
  source 1..20: mol_type = other DNA
gtctcagtttctagttcaga

SEQ ID NO: 2228 - DNA, 20 bp, synthetic construct
  source 1..20: mol_type = other DNA
agacataaaccaacacacat

SEQ ID NO: 2229 - DNA, 20 bp, synthetic construct
  source 1..20: mol_type = other DNA
tgtatctttcctatgtgtgt

SEQ ID NO: 2230 - DNA, 20 bp, synthetic construct
  source 1..20: mol_type = other DNA
ataggaaagatacactccac

SEQ ID NO: 2231 - DNA, 20 bp, synthetic construct
  source 1..20: mol_type = other DNA
agatacactccactggacag

SEQ ID NO: 2232 - DNA, 20 bp, synthetic construct
  source 1..20: mol_type = other DNA
gatacactccactggacagt

SEQ ID NO: 2233 - DNA, 20 bp, synthetic construct
  source 1..20: mol_type = other DNA
catgggctcccactgtccag

SEQ ID NO: 2234 - DNA, 20 bp, synthetic construct
  source 1..20: mol_type = other DNA
cagtgggagcccatgcacaa

SEQ ID NO: 2235 - DNA, 20 bp, synthetic construct
  source 1..20: mol_type = other DNA
gcccatgcacaaaggttctt

SEQ ID NO: 2236 - DNA, 20 bp, synthetic construct
  source 1..20: mol_type = other DNA
gccaaagaacctttgtgcat

SEQ ID NO: 2237 - DNA, 20 bp, synthetic construct
  source 1..20: mol_type = other DNA
agccaaagaacctttgtgca

SEQ ID NO: 2238 - DNA, 20 bp, synthetic construct
  source 1..20: mol_type = other DNA
tgacagcagtttcttattat

SEQ ID NO: 2239 - DNA, 20 bp, synthetic construct
  source 1..20: mol_type = other DNA
gacagcagtttcttattatt

SEQ ID NO: 2240 - DNA, 20 bp, synthetic construct
  source 1..20: mol_type = other DNA
gatgagctttgtttctgccc

SEQ ID NO: 2241 - DNA, 20 bp, synthetic construct
  source 1..20: mol_type = other DNA
atgagctttgtttctgccct

SEQ ID NO: 2242 - DNA, 20 bp, synthetic construct
  source 1..20: mol_type = other DNA
ccctgggtgagagtttattt

SEQ ID NO: 2243 - DNA, 20 bp, synthetic construct
  source 1..20: mol_type = other DNA
cctaaataaactctcaccca

SEQ ID NO: 2244 - DNA, 20 bp, synthetic construct
  source 1..20: mol_type = other DNA
tcctaaataaactctcaccc

SEQ ID NO: 2245 - DNA, 20 bp, synthetic construct
  source 1..20: mol_type = other DNA
cacactaagacaaccactga

SEQ ID NO: 2246 - DNA, 20 bp, synthetic construct
  source 1..20: mol_type = other DNA
actttgttctaggccatcag

SEQ ID NO: 2247 - DNA, 20 bp, synthetic construct
  source 1..20: mol_type = other DNA
cagtgctctgactttgttct

SEQ ID NO: 2248 - DNA, 20 bp, synthetic construct
  source 1..20: mol_type = other DNA
agtcagagcactgtgcgttg

SEQ ID NO: 2249 - DNA, 20 bp, synthetic construct
  source 1..20: mol_type = other DNA
cactgtgcgttgtggatctt

SEQ ID NO: 2250 - DNA, 20 bp, synthetic construct
  source 1..20: mol_type = other DNA
gatgctttaatcatcatgaa

SEQ ID NO: 2251 - DNA, 20 bp, synthetic construct
  source 1..20: mol_type = other DNA
actaacacattttaatagga

SEQ ID NO: 2252 - DNA, 20 bp, synthetic construct
  source 1..20: mol_type = other DNA
atggactaacacattttaat

SEQ ID NO: 2253 - DNA, 20 bp, synthetic construct
  source 1..20: mol_type = other DNA
aaaatgtgttagtccatttt

SEQ ID NO: 2254 - DNA, 20 bp, synthetic construct
  source 1..20: mol_type = other DNA
aaatgtgttagtccattttt

SEQ ID NO: 2255 - DNA, 20 bp, synthetic construct
  source 1..20: mol_type = other DNA
aatgtgttagtccatttttg

SEQ ID NO: 2256 - DNA, 20 bp, synthetic construct
  source 1..20: mol_type = other DNA
agtaaacataaccccaaaaa

SEQ ID NO: 2257 - DNA, 20 bp, synthetic construct
  source 1..20: mol_type = other DNA
gggttatgtttactatacaa

SEQ ID NO: 2258 - DNA, 20 bp, synthetic construct
  source 1..20: mol_type = other DNA
ttatgtttactatacaaagg

SEQ ID NO: 2259 - DNA, 20 bp, synthetic construct
  source 1..20: mol_type = other DNA
gtttactatacaaaggtgga

SEQ ID NO: 2260 - DNA, 20 bp, synthetic construct
  source 1..20: mol_type = other DNA
tttactatacaaaggtggaa

SEQ ID NO: 2261 - DNA, 20 bp, synthetic construct
  source 1..20: mol_type = other DNA
ttactatacaaaggtggaag

SEQ ID NO: 2262 - DNA, 20 bp, synthetic construct
  source 1..20: mol_type = other DNA
caaaggtggaaggggttatc

SEQ ID NO: 2263 - DNA, 20 bp, synthetic construct
  source 1..20: mol_type = other DNA
gttatctggccccatcttac

SEQ ID NO: 2264 - DNA, 20 bp, synthetic construct
  source 1..20: mol_type = other DNA
acacagttacctgtaagatg

SEQ ID NO: 2265 - DNA, 20 bp, synthetic construct
  source 1..20: mol_type = other DNA
gacacagttacctgtaagat

SEQ ID NO: 2266 - DNA, 20 bp, synthetic construct
  source 1..20: mol_type = other DNA
ggacacagttacctgtaaga

SEQ ID NO: 2267 - DNA, 20 bp, synthetic construct
  source 1..20: mol_type = other DNA
aggtaactgtgtcccttttg

SEQ ID NO: 2268 - DNA, 20 bp, synthetic construct
  source 1..20: mol_type = other DNA
tggtttttatatccacaaaa

SEQ ID NO: 2269 - DNA, 20 bp, synthetic construct
  source 1..20: mol_type = other DNA
atggtttttatatccacaaa

SEQ ID NO: 2270 - DNA, 20 bp, synthetic construct
  source 1..20: mol_type = other DNA
aataaaattgcagtatctga

SEQ ID NO: 2271 - DNA, 20 bp, synthetic construct
  source 1..20: mol_type = other DNA
tatttttgattatgtgtctg

SEQ ID NO: 2272 - DNA, 20 bp, synthetic construct
  source 1..20: mol_type = other DNA
atttttgattatgtgtctga

SEQ ID NO: 2273 - DNA, 20 bp, synthetic construct
  source 1..20: mol_type = other DNA
cagtatgcacatctgcatgc

SEQ ID NO: 2274 - DNA, 20 bp, synthetic construct
  source 1..20: mol_type = other DNA
catctgcatgcaggtgcctg

SEQ ID NO: 2275 - DNA, 20 bp, synthetic construct
  source 1..20: mol_type = other DNA
caggtgcctgtggaagcctg

SEQ ID NO: 2276 - DNA, 20 bp, synthetic construct
  source 1..20: mol_type = other DNA
atgtctccacaggcttccac

SEQ ID NO: 2277 - DNA, 20 bp, synthetic construct
  source 1..20: mol_type = other DNA
aggtgatctgatgtctccac

SEQ ID NO: 2278 - DNA, 20 bp, synthetic construct
  source 1..20: mol_type = other DNA
gacatcagatcacctgaagc

SEQ ID NO: 2279 - DNA, 20 bp, synthetic construct
  source 1..20: mol_type = other DNA
tcacctgaagctggagtttc

SEQ ID NO: 2280 - DNA, 20 bp, synthetic construct
  source 1..20: mol_type = other DNA
ctgcctgaaactccagcttc

SEQ ID NO: 2281 - DNA, 20 bp, synthetic construct
  source 1..20: mol_type = other DNA
agttttatgccaccagacac

SEQ ID NO: 2282 - DNA, 20 bp, synthetic construct
  source 1..20: mol_type = other DNA
ttctcagcaccagtgtctgg

SEQ ID NO: 2283 - DNA, 20 bp, synthetic construct
  source 1..20: mol_type = other DNA
ctattctcagcaccagtgtc

SEQ ID NO: 2284 - DNA, 20 bp, synthetic construct
  source 1..20: mol_type = other DNA
ataaaatatactgcttttgc

SEQ ID NO: 2285 - DNA, 20 bp, synthetic construct
  source 1..20: mol_type = other DNA
gttgcttttggctggagaga

SEQ ID NO: 2286 - DNA, 20 bp, synthetic construct
  source 1..20: mol_type = other DNA
ttttaaaggttgcttttggc

SEQ ID NO: 2287 - DNA, 20 bp, synthetic construct
  source 1..20: mol_type = other DNA
cagcttttaaaggttgcttt

SEQ ID NO: 2288 - DNA, 20 bp, synthetic construct
  source 1..20: mol_type = other DNA
aaagcaacctttaaaagctg

SEQ ID NO: 2289 - DNA, 20 bp, synthetic construct
  source 1..20: mol_type = other DNA
acataaaccacagcttttaa

SEQ ID NO: 2290 - DNA, 20 bp, synthetic construct
  source 1..20: mol_type = other DNA
ctctaagtggatgaattaaa

SEQ ID NO: 2291 - DNA, 20 bp, synthetic construct
  source 1..20: mol_type = other DNA
catttaattcatccacttag

SEQ ID NO: 2292 - DNA, 20 bp, synthetic construct
  source 1..20: mol_type = other DNA
atttaattcatccacttaga

SEQ ID NO: 2293 - DNA, 20 bp, synthetic construct
  source 1..20: mol_type = other DNA
attgaagtgtaccctctaag

SEQ ID NO: 2294 - DNA, 20 bp, synthetic construct
  source 1..20: mol_type = other DNA
aaaatatgcttacagatctg

SEQ ID NO: 2295 - DNA, 20 bp, synthetic construct
  source 1..20: mol_type = other DNA
aaatatgcttacagatctgt

SEQ ID NO: 2296 - DNA, 20 bp, synthetic construct
  source 1..20: mol_type = other DNA
tgctaaaagggttctaaaat

SEQ ID NO: 2297 - DNA, 20 bp, synthetic construct
  source 1..20: mol_type = other DNA
taatatctgtagtgctaaaa

SEQ ID NO: 2298 - DNA, 20 bp, synthetic construct
  source 1..20: mol_type = other DNA
ttaatatctgtagtgctaaa

SEQ ID NO: 2299 - DNA, 20 bp, synthetic construct
  source 1..20: mol_type = other DNA
gctgggggctggggagaata

SEQ ID NO: 2300 - DNA, 20 bp, synthetic construct
  source 1..20: mol_type = other DNA
agctgggggctggggagaat

SEQ ID NO: 2301 - DNA, 20 bp, synthetic construct
  source 1..20: mol_type = other DNA
gggactggagctgggggctg

SEQ ID NO: 2302 - DNA, 20 bp, synthetic construct
  source 1..20: mol_type = other DNA
agggactggagctgggggct

SEQ ID NO: 2303 - DNA, 20 bp, synthetic construct
  source 1..20: mol_type = other DNA
cagggactggagctgggggc

SEQ ID NO: 2304 - DNA, 20 bp, synthetic construct
  source 1..20: mol_type = other DNA
cagcccccagctccagtccc

SEQ ID NO: 2305 - DNA, 20 bp, synthetic construct
  source 1..20: mol_type = other DNA
atgccagggactggagctgg

SEQ ID NO: 2306 - DNA, 20 bp, synthetic construct
  source 1..20: mol_type = other DNA
gatgccagggactggagctg

SEQ ID NO: 2307 - DNA, 20 bp, synthetic construct
  source 1..20: mol_type = other DNA
ggatgccagggactggagct

SEQ ID NO: 2308 - DNA, 20 bp, synthetic construct
  source 1..20: mol_type = other DNA
tggatgccagggactggagc

SEQ ID NO: 2309 - DNA, 20 bp, synthetic construct
  source 1..20: mol_type = other DNA
gatttgtggatgccagggac

SEQ ID NO: 2310 - DNA, 20 bp, synthetic construct
  source 1..20: mol_type = other DNA
aaggggatttgtggatgcca

SEQ ID NO: 2311 - DNA, 20 bp, synthetic construct
  source 1..20: mol_type = other DNA
gaaggggatttgtggatgcc

SEQ ID NO: 2312 - DNA, 20 bp, synthetic construct
  source 1..20: mol_type = other DNA
gatggcaggaaggggatttg

SEQ ID NO: 2313 - DNA, 20 bp, synthetic construct
  source 1..20: mol_type = other DNA
aatctatagatggcaggaag

SEQ ID NO: 2314 - DNA, 20 bp, synthetic construct
  source 1..20: mol_type = other DNA
gaatctatagatggcaggaa

SEQ ID NO: 2315 - DNA, 20 bp, synthetic construct
  source 1..20: mol_type = other DNA
tgaatctatagatggcagga

SEQ ID NO: 2316 - DNA, 20 bp, synthetic construct
  source 1..20: mol_type = other DNA
gaggtgaatctatagatggc

SEQ ID NO: 2317 - DNA, 20 bp, synthetic construct
  source 1..20: mol_type = other DNA
agaagaggtgaatctataga

SEQ ID NO: 2318 - DNA, 20 bp, synthetic construct
  source 1..20: mol_type = other DNA
ttcagtgtaaagtctagaag

SEQ ID NO: 2319 - DNA, 20 bp, synthetic construct
  source 1..20: mol_type = other DNA
ttctagactttacactgaaa

SEQ ID NO: 2320 - DNA, 20 bp, synthetic construct
  source 1..20: mol_type = other DNA
aaatggtattacacaacatg

SEQ ID NO: 2321 - DNA, 20 bp, synthetic construct
  source 1..20: mol_type = other DNA
ttgcttgccgtgtgtctgtg

SEQ ID NO: 2322 - DNA, 20 bp, synthetic construct
  source 1..20: mol_type = other DNA
agatgaacctcacagacaca

SEQ ID NO: 2323 - DNA, 20 bp, synthetic construct
  source 1..20: mol_type = other DNA
tcatctgtgttgagcatgaa

SEQ ID NO: 2324 - DNA, 20 bp, synthetic construct
  source 1..20: mol_type = other DNA
taggcgacaggcatattcat

SEQ ID NO: 2325 - DNA, 20 bp, synthetic construct
  source 1..20: mol_type = other DNA
ttaggcgacaggcatattca

SEQ ID NO: 2326 - DNA, 20 bp, synthetic construct
  source 1..20: mol_type = other DNA
gtgttgctattttaggcgac

SEQ ID NO: 2327 - DNA, 20 bp, synthetic construct
  source 1..20: mol_type = other DNA
tgtgaaagtgttgctatttt

SEQ ID NO: 2328 - DNA, 20 bp, synthetic construct
  source 1..20: mol_type = other DNA
ccttctttcttcttcccaag

SEQ ID NO: 2329 - DNA, 20 bp, synthetic construct
  source 1..20: mol_type = other DNA
cctcttgggaagaagaaaga

SEQ ID NO: 2330 - DNA, 20 bp, synthetic construct
  source 1..20: mol_type = other DNA
cttctttcttcttcccaaga

SEQ ID NO: 2331 - DNA, 20 bp, synthetic construct
  source 1..20: mol_type = other DNA
gctgcaataatgtccctctt

SEQ ID NO: 2332 - DNA, 20 bp, synthetic construct
  source 1..20: mol_type = other DNA
ggctgcaataatgtccctct

SEQ ID NO: 2333 - DNA, 20 bp, synthetic construct
  source 1..20: mol_type = other DNA
agacacaggagaaaactagc

SEQ ID NO: 2334 - DNA, 20 bp, synthetic construct
  source 1..20: mol_type = other DNA
agaaacacgaaaaaagacac

SEQ ID NO: 2335 - DNA, 20 bp, synthetic construct
  source 1..20: mol_type = other DNA
cgtgtttctcaagtagatga

SEQ ID NO: 2336 - DNA, 20 bp, synthetic construct
  source 1..20: mol_type = other DNA
gtgtttctcaagtagatgaa

SEQ ID NO: 2337 - DNA, 20 bp, synthetic construct
  source 1..20: mol_type = other DNA
tctcaagtagatgaagggac

SEQ ID NO: 2338 - DNA, 20 bp, synthetic construct
  source 1..20: mol_type = other DNA
ttaggaaactgacaaagcag

SEQ ID NO: 2339 - DNA, 20 bp, synthetic construct
  source 1..20: mol_type = other DNA
tttaggaaactgacaaagca

SEQ ID NO: 2340 - DNA, 20 bp, synthetic construct
  source 1..20: mol_type = other DNA
atttaggaaactgacaaagc

SEQ ID NO: 2341 - DNA, 20 bp, synthetic construct
  source 1..20: mol_type = other DNA
aatacagtattcactcattt

SEQ ID NO: 2342 - DNA, 20 bp, synthetic construct
  source 1..20: mol_type = other DNA
aaatgagtgaatactgtatt

SEQ ID NO: 2343 - DNA, 20 bp, synthetic construct
  source 1..20: mol_type = other DNA
tattttggtctttctgattg

SEQ ID NO: 2344 - DNA, 20 bp, synthetic construct
  source 1..20: mol_type = other DNA
ttattttggtctttctgatt

SEQ ID NO: 2345 - DNA, 20 bp, synthetic construct
  source 1..20: mol_type = other DNA
attattttggtctttctgat

SEQ ID NO: 2346 - DNA, 20 bp, synthetic construct
  source 1..20: mol_type = other DNA
gagattattttaaattattt

SEQ ID NO: 2347 - DNA, 20 bp, synthetic construct
  source 1..20: mol_type = other DNA
atctcgtctctatatcacta

SEQ ID NO: 2348 - DNA, 20 bp, synthetic construct
  source 1..20: mol_type = other DNA
ctaaggtatccttttccact

SEQ ID NO: 2349 - DNA, 20 bp, synthetic construct
  source 1..20: mol_type = other DNA
taaggtatccttttccactt

SEQ ID NO: 2350 - DNA, 20 bp, synthetic construct
  source 1..20: mol_type = other DNA
ctgcatggcccaagtggaaa

SEQ ID NO: 2351 - DNA, 20 bp, synthetic construct
  source 1..20: mol_type = other DNA
atttctctgcatggcccaag

SEQ ID NO: 2352 - DNA, 20 bp, synthetic construct
  source 1..20: mol_type = other DNA
ggcatgcttatttctctgca

SEQ ID NO: 2353 - DNA, 20 bp, synthetic construct
  source 1..20: mol_type = other DNA
gggtggggtggggtcaatca

SEQ ID NO: 2354 - DNA, 20 bp, synthetic construct
  source 1..20: mol_type = other DNA
ctgggggttggggtggggtg

SEQ ID NO: 2355 - DNA, 20 bp, synthetic construct
  source 1..20: mol_type = other DNA
actgggggttggggtggggt

SEQ ID NO: 2356 - DNA, 20 bp, synthetic construct
  source 1..20: mol_type = other DNA
cactgggggttggggtgggg

SEQ ID NO: 2357 - DNA, 20 bp, synthetic construct
  source 1..20: mol_type = other DNA
caccccaccccaacccccag

SEQ ID NO: 2358 - DNA, 20 bp, synthetic construct
  source 1..20: mol_type = other DNA
caccactgggggttggggtg

SEQ ID NO: 2359 - DNA, 20 bp, synthetic construct
  source 1..20: mol_type = other DNA
tcaccactgggggttggggt

SEQ ID NO: 2360 - DNA, 20 bp, synthetic construct
  source 1..20: mol_type = other DNA
gtcaccactgggggttgggg

SEQ ID NO: 2361 - DNA, 20 bp, synthetic construct
  source 1..20: mol_type = other DNA
cttgtcaccactgggggttg

SEQ ID NO: 2362 - DNA, 20 bp, synthetic construct
  source 1..20: mol_type = other DNA
cccaacccccagtggtgaca

SEQ ID NO: 2363 - DNA, 20 bp, synthetic construct
  source 1..20: mol_type = other DNA
ccttgtcaccactgggggtt

SEQ ID NO: 2364 - DNA, 20 bp, synthetic construct
  source 1..20: mol_type = other DNA
tccttgtcaccactgggggt

SEQ ID NO: 2365 - DNA, 20 bp, synthetic construct
  source 1..20: mol_type = other DNA
gaggtccttgtcaccactgg

SEQ ID NO: 2366 - DNA, 20 bp, synthetic construct
  source 1..20: mol_type = other DNA
ggaggtccttgtcaccactg

SEQ ID NO: 2367 - DNA, 20 bp, synthetic construct
  source 1..20: mol_type = other DNA
gggaggtccttgtcaccact

SEQ ID NO: 2368 - DNA, 20 bp, synthetic construct
  source 1..20: mol_type = other DNA
ggggaggtccttgtcaccac

SEQ ID NO: 2369 - DNA, 20 bp, synthetic construct
  source 1..20: mol_type = other DNA
ggtgacaaggacctccccag

SEQ ID NO: 2370 - DNA, 20 bp, synthetic construct
  source 1..20: mol_type = other DNA
aaatggttgagccgctgggg

SEQ ID NO: 2371 - DNA, 20 bp, synthetic construct
  source 1..20: mol_type = other DNA
ttcaaatggttgagccgctg

SEQ ID NO: 2372 - DNA, 20 bp, synthetic construct
  source 1..20: mol_type = other DNA
attcaaatggttgagccgct

SEQ ID NO: 2373 - DNA, 20 bp, synthetic construct
  source 1..20: mol_type = other DNA
tattcaaatggttgagccgc

SEQ ID NO: 2374 - DNA, 20 bp, synthetic construct
  source 1..20: mol_type = other DNA
gctcaaccatttgaataaaa

SEQ ID NO: 2375 - DNA, 20 bp, synthetic construct
  source 1..20: mol_type = other DNA
aagtgtcctttttattcaaa

SEQ ID NO: 2376 - DNA, 20 bp, synthetic construct
  source 1..20: mol_type = other DNA
atcttagatttgtgcaaaat

SEQ ID NO: 2377 - DNA, 20 bp, synthetic construct
  source 1..20: mol_type = other DNA
catcttagatttgtgcaaaa

SEQ ID NO: 2378 - DNA, 20 bp, synthetic construct
  source 1..20: mol_type = other DNA
acaaatctaagatgagcaag

SEQ ID NO: 2379 - DNA, 20 bp, synthetic construct
  source 1..20: mol_type = other DNA
gtcacctgtaaacatgtgcc

SEQ ID NO: 2380 - DNA, 20 bp, synthetic construct
  source 1..20: mol_type = other DNA
tgctccaggcacatgtttac

SEQ ID NO: 2381 - DNA, 20 bp, synthetic construct
  source 1..20: mol_type = other DNA
gtaaacatgtgcctggagca

SEQ ID NO: 2382 - DNA, 20 bp, synthetic construct
  source 1..20: mol_type = other DNA
ctcaggtcgttccgtgctcc

SEQ ID NO: 2383 - DNA, 20 bp, synthetic construct
  source 1..20: mol_type = other DNA
gagcacggaacgacctgagt

SEQ ID NO: 2384 - DNA, 20 bp, synthetic construct
  source 1..20: mol_type = other DNA
cgacctgagtaggcagaaaa

SEQ ID NO: 2385 - DNA, 20 bp, synthetic construct
  source 1..20: mol_type = other DNA
cctgagtaggcagaaaaagg

SEQ ID NO: 2386 - DNA, 20 bp, synthetic construct
  source 1..20: mol_type = other DNA
ccacctttttctgcctactc

SEQ ID NO: 2387 - DNA, 20 bp, synthetic construct
  source 1..20: mol_type = other DNA
atttatgatttttcttttaa

SEQ ID NO: 2388 - DNA, 20 bp, synthetic construct
  source 1..20: mol_type = other DNA
agtgagaaaggtgggggaaa

SEQ ID NO: 2389 - DNA, 20 bp, synthetic construct
  source 1..20: mol_type = other DNA
ttggaaagtgagaaaggtgg

SEQ ID NO: 2390 - DNA, 20 bp, synthetic construct
  source 1..20: mol_type = other DNA
gttggaaagtgagaaaggtg

SEQ ID NO: 2391 - DNA, 20 bp, synthetic construct
  source 1..20: mol_type = other DNA
tgttggaaagtgagaaaggt

SEQ ID NO: 2392 - DNA, 20 bp, synthetic construct
  source 1..20: mol_type = other DNA
ttgttggaaagtgagaaagg

SEQ ID NO: 2393 - DNA, 20 bp, synthetic construct
  source 1..20: mol_type = other DNA
atattgttggaaagtgagaa

SEQ ID NO: 2394 - DNA, 20 bp, synthetic construct
  source 1..20: mol_type = other DNA
tttccaacaatattatattc

SEQ ID NO: 2395 - DNA, 20 bp, synthetic construct
  source 1..20: mol_type = other DNA
acaccagaatataatattgt

SEQ ID NO: 2396 - DNA, 20 bp, synthetic construct
  source 1..20: mol_type = other DNA
cttttattccccagttgttt

SEQ ID NO: 2397 - DNA, 20 bp, synthetic construct
  source 1..20: mol_type = other DNA
tttaatcaccaaaacaactg

SEQ ID NO: 2398 - DNA, 20 bp, synthetic construct
  source 1..20: mol_type = other DNA
atttaatcaccaaaacaact

SEQ ID NO: 2399 - DNA, 20 bp, synthetic construct
  source 1..20: mol_type = other DNA
gatttaatcaccaaaacaac

SEQ ID NO: 2400 - DNA, 20 bp, synthetic construct
  source 1..20: mol_type = other DNA
ttttggtgattaaatcattt

SEQ ID NO: 2401 - DNA, 20 bp, synthetic construct
  source 1..20: mol_type = other DNA
tttggtgattaaatcatttt

SEQ ID NO: 2402 - DNA, 20 bp, synthetic construct
  source 1..20: mol_type = other DNA
ttggtgattaaatcattttg

SEQ ID NO: 2403 - DNA, 20 bp, synthetic construct
  source 1..20: mol_type = other DNA
tggtgattaaatcattttgg

SEQ ID NO: 2404 - DNA, 20 bp, synthetic construct
  source 1..20: mol_type = other DNA
actctcattcactgctccct

SEQ ID NO: 2405 - DNA, 20 bp, synthetic construct
  source 1..20: mol_type = other DNA
aaaaaaaacactgtcaccaa

SEQ ID NO: 2406 - DNA, 20 bp, synthetic construct
  source 1..20: mol_type = other DNA
gaaaaaaaacactgtcacca

SEQ ID NO: 2407 - DNA, 20 bp, synthetic construct
  source 1..20: mol_type = other DNA
gcagagacagagggaacagc

SEQ ID NO: 2408 - DNA, 20 bp, synthetic construct
  source 1..20: mol_type = other DNA
tgaaaatgagcagagacaga

SEQ ID NO: 2409 - DNA, 20 bp, synthetic construct
  source 1..20: mol_type = other DNA
atgaaaatgagcagagacag

SEQ ID NO: 2410 - DNA, 20 bp, synthetic construct
  source 1..20: mol_type = other DNA
ctgtctctgctcattttcat

SEQ ID NO: 2411 - DNA, 20 bp, synthetic construct
  source 1..20: mol_type = other DNA
tgctcattttcataggaatc

SEQ ID NO: 2412 - DNA, 20 bp, synthetic construct
  source 1..20: mol_type = other DNA
atctggcaccttagaatccc

SEQ ID NO: 2413 - DNA, 20 bp, synthetic construct
  source 1..20: mol_type = other DNA
gcaggcagcctgggattcta

SEQ ID NO: 2414 - DNA, 20 bp, synthetic construct
  source 1..20: mol_type = other DNA
catttgactgcaggcagcct

SEQ ID NO: 2415 - DNA, 20 bp, synthetic construct
  source 1..20: mol_type = other DNA
gcatttgactgcaggcagcc

SEQ ID NO: 2416 - DNA, 20 bp, synthetic construct
  source 1..20: mol_type = other DNA
cctgcagtcaaatgcttgct

SEQ ID NO: 2417 - DNA, 20 bp, synthetic construct
  source 1..20: mol_type = other DNA
cctagcaagcatttgactgc

SEQ ID NO: 2418 - DNA, 20 bp, synthetic construct
  source 1..20: mol_type = other DNA
ctgcagtcaaatgcttgcta

SEQ ID NO: 2419 - DNA, 20 bp, synthetic construct
  source 1..20: mol_type = other DNA
cagtcaaatgcttgctaggg

SEQ ID NO: 2420 - DNA, 20 bp, synthetic construct
  source 1..20: mol_type = other DNA
agtcaaatgcttgctaggga

SEQ ID NO: 2421 - DNA, 20 bp, synthetic construct
  source 1..20: mol_type = other DNA
gtcaaatgcttgctagggag

SEQ ID NO: 2422 - DNA, 20 bp, synthetic construct
  source 1..20: mol_type = other DNA
ttgctagggaggggagccag

SEQ ID NO: 2423 - DNA, 20 bp, synthetic construct
  source 1..20: mol_type = other DNA
tgctagggaggggagccagt

SEQ ID NO: 2424 - DNA, 20 bp, synthetic construct
  source 1..20: mol_type = other DNA
tagggaggggagccagtggg

SEQ ID NO: 2425 - DNA, 20 bp, synthetic construct
  source 1..20: mol_type = other DNA
agggaggggagccagtgggt

SEQ ID NO: 2426 - DNA, 20 bp, synthetic construct
  source 1..20: mol_type = other DNA
gggaggggagccagtgggtg

SEQ ID NO: 2427 - DNA, 20 bp, synthetic construct
  source 1..20: mol_type = other DNA
ggaggggagccagtgggtgg

SEQ ID NO: 2428 - DNA, 20 bp, synthetic construct
  source 1..20: mol_type = other DNA
ttgcaggttcccccacccac

SEQ ID NO: 2429 - DNA, 20 bp, synthetic construct
  source 1..20: mol_type = other DNA
atttggagttgatttcttgc

SEQ ID NO: 2430 - DNA, 20 bp, synthetic construct
  source 1..20: mol_type = other DNA
aaatcaactccaaatttaat

SEQ ID NO: 2431 - DNA, 20 bp, synthetic construct
  source 1..20: mol_type = other DNA
gagcttagtcctattaaatt

SEQ ID NO: 2432 - DNA, 20 bp, synthetic construct
  source 1..20: mol_type = other DNA
ctgctaatcaggcatggtgt

SEQ ID NO: 2433 - DNA, 20 bp, synthetic construct
  source 1..20: mol_type = other DNA
accatgcctgattagcagct

SEQ ID NO: 2434 - DNA, 20 bp, synthetic construct
  source 1..20: mol_type = other DNA
acctagctgctaatcaggca

SEQ ID NO: 2435 - DNA, 20 bp, synthetic construct
  source 1..20: mol_type = other DNA
atgagacctagctgctaatc

SEQ ID NO: 2436 - DNA, 20 bp, synthetic construct
  source 1..20: mol_type = other DNA
ggtctcatccttacccctcc

SEQ ID NO: 2437 - DNA, 20 bp, synthetic construct
  source 1..20: mol_type = other DNA
tccttacccctccaggaata

SEQ ID NO: 2438 - DNA, 20 bp, synthetic construct
  source 1..20: mol_type = other DNA
tccttattcctggaggggta

SEQ ID NO: 2439 - DNA, 20 bp, synthetic construct
  source 1..20: mol_type = other DNA
tacccctccaggaataagga

SEQ ID NO: 2440 - DNA, 20 bp, synthetic construct
  source 1..20: mol_type = other DNA
aaccttccttattcctggag

SEQ ID NO: 2441 - DNA, 20 bp, synthetic construct
  source 1..20: mol_type = other DNA
caaccttccttattcctgga

SEQ ID NO: 2442 - DNA, 20 bp, synthetic construct
  source 1..20: mol_type = other DNA
gcaaccttccttattcctgg

SEQ ID NO: 2443 - DNA, 20 bp, synthetic construct
  source 1..20: mol_type = other DNA
tctgcaaccttccttattcc

SEQ ID NO: 2444 - DNA, 20 bp, synthetic construct
  source 1..20: mol_type = other DNA
aggttgcagaagtccctgaa

SEQ ID NO: 2445 - DNA, 20 bp, synthetic construct
  source 1..20: mol_type = other DNA
ggctcagcaaatacctttca

SEQ ID NO: 2446 - DNA, 20 bp, synthetic construct
  source 1..20: mol_type = other DNA
aggctcagcaaatacctttc

SEQ ID NO: 2447 - DNA, 20 bp, synthetic construct
  source 1..20: mol_type = other DNA
gctgagcctcttgtgaaccg

SEQ ID NO: 2448 - DNA, 20 bp, synthetic construct
  source 1..20: mol_type = other DNA
ctgagcctcttgtgaaccgt

SEQ ID NO: 2449 - DNA, 20 bp, synthetic construct
  source 1..20: mol_type = other DNA
gcctcttgtgaaccgtgggt

SEQ ID NO: 2450 - DNA, 20 bp, synthetic construct
  source 1..20: mol_type = other DNA
gccaacccacggttcacaag

SEQ ID NO: 2451 - DNA, 20 bp, synthetic construct
  source 1..20: mol_type = other DNA
agttcaggtgagccaaccca

SEQ ID NO: 2452 - DNA, 20 bp, synthetic construct
  source 1..20: mol_type = other DNA
aagaatatctactaaagttc

SEQ ID NO: 2453 - DNA, 20 bp, synthetic construct
  source 1..20: mol_type = other DNA
atattctttagcgacatatt

SEQ ID NO: 2454 - DNA, 20 bp, synthetic construct
  source 1..20: mol_type = other DNA
tattctttagcgacatattt

SEQ ID NO: 2455 - DNA, 20 bp, synthetic construct
  source 1..20: mol_type = other DNA
ttagcgacatatttgggctt

SEQ ID NO: 2456 - DNA, 20 bp, synthetic construct
  source 1..20: mol_type = other DNA
tgtggagagataaaagagag

SEQ ID NO: 2457 - DNA, 20 bp, synthetic construct
  source 1..20: mol_type = other DNA
ttatctctccacaaaagtct

SEQ ID NO: 2458 - DNA, 20 bp, synthetic construct
  source 1..20: mol_type = other DNA
tcagtttgccaagacttttg

SEQ ID NO: 2459 - DNA, 20 bp, synthetic construct
  source 1..20: mol_type = other DNA
tgatgtttatgcaaccagta

SEQ ID NO: 2460 - DNA, 20 bp, synthetic construct
  source 1..20: mol_type = other DNA
tatgcaaccagtaaggcctc

SEQ ID NO: 2461 - DNA, 20 bp, synthetic construct
  source 1..20: mol_type = other DNA
atgcaaccagtaaggcctct

SEQ ID NO: 2462 - DNA, 20 bp, synthetic construct
  source 1..20: mol_type = other DNA
tgcaaccagtaaggcctctg

SEQ ID NO: 2463 - DNA, 20 bp, synthetic construct
  source 1..20: mol_type = other DNA
ctcagccccagaggccttac

SEQ ID NO: 2464 - DNA, 20 bp, synthetic construct
  source 1..20: mol_type = other DNA
cagtaaggcctctggggctg

SEQ ID NO: 2465 - DNA, 20 bp, synthetic construct
  source 1..20: mol_type = other DNA
agtaaggcctctggggctga

SEQ ID NO: 2466 - DNA, 20 bp, synthetic construct
  source 1..20: mol_type = other DNA
gtaaggcctctggggctgag

SEQ ID NO: 2467 - DNA, 20 bp, synthetic construct
  source 1..20: mol_type = other DNA
taaggcctctggggctgagg

SEQ ID NO: 2468 - DNA, 20 bp, synthetic construct
  source 1..20: mol_type = other DNA
ggcctctggggctgaggggg

SEQ ID NO: 2469 - DNA, 20 bp, synthetic construct
  source 1..20: mol_type = other DNA
gcctctggggctgagggggt

SEQ ID NO: 2470 - DNA, 20 bp, synthetic construct
  source 1..20: mol_type = other DNA
tcccaccccctcagccccag

SEQ ID NO: 2471 - DNA, 20 bp, synthetic construct
  source 1..20: mol_type = other DNA
ctgagggggtgggaagccag

SEQ ID NO: 2472 - DNA, 20 bp, synthetic construct
  source 1..20: mol_type = other DNA
tgagggggtgggaagccagt

SEQ ID NO: 2473 - DNA, 20 bp, synthetic construct
  source 1..20: mol_type = other DNA
gggggtgggaagccagtggg

SEQ ID NO: 2474 - DNA, 20 bp, synthetic construct
  source 1..20: mol_type = other DNA
ggtgggaagccagtgggtgg

SEQ ID NO: 2475 - DNA, 20 bp, synthetic construct
  source 1..20: mol_type = other DNA
ttgcaggttccgccacccac

SEQ ID NO: 2476 - DNA, 20 bp, synthetic construct
  source 1..20: mol_type = other DNA
atttggggcggatttcttgc

SEQ ID NO: 2477 - DNA, 20 bp, synthetic construct
  source 1..20: mol_type = other DNA
agaaatccgccccaaattta

SEQ ID NO: 2478 - DNA, 20 bp, synthetic construct
  source 1..20: mol_type = other DNA
atgcttccttaaatttgggg

SEQ ID NO: 2479 - DNA, 20 bp, synthetic construct
  source 1..20: mol_type = other DNA
ccccaaatttaaggaagcat

SEQ ID NO: 2480 - DNA, 20 bp, synthetic construct
  source 1..20: mol_type = other DNA
cctatgcttccttaaatttg

SEQ ID NO: 2481 - DNA, 20 bp, synthetic construct
  source 1..20: mol_type = other DNA
tcctatgcttccttaaattt

SEQ ID NO: 2482 - DNA, 20 bp, synthetic construct
  source 1..20: mol_type = other DNA
ttcctatgcttccttaaatt

SEQ ID NO: 2483 - DNA, 20 bp, synthetic construct
  source 1..20: mol_type = other DNA
cctaccctatgtctgccttg

SEQ ID NO: 2484 - DNA, 20 bp, synthetic construct
  source 1..20: mol_type = other DNA
ccacaaggcagacatagggt

SEQ ID NO: 2485 - DNA, 20 bp, synthetic construct
  source 1..20: mol_type = other DNA
ctagccacaaggcagacata

SEQ ID NO: 2486 - DNA, 20 bp, synthetic construct
  source 1..20: mol_type = other DNA
cctatgtctgccttgtggct

SEQ ID NO: 2487 - DNA, 20 bp, synthetic construct
  source 1..20: mol_type = other DNA
cctagccacaaggcagacat

SEQ ID NO: 2488 - DNA, 20 bp, synthetic construct
  source 1..20: mol_type = other DNA
gaactaaggacctagccaca

SEQ ID NO: 2489 - DNA, 20 bp, synthetic construct
  source 1..20: mol_type = other DNA
tccttagttcattgtctctt

SEQ ID NO: 2490 - DNA, 20 bp, synthetic construct
  source 1..20: mol_type = other DNA
acctaagagacaatgaacta

SEQ ID NO: 2491 - DNA, 20 bp, synthetic construct
  source 1..20: mol_type = other DNA
ttctactctcaagagaatct

SEQ ID NO: 2492 - DNA, 20 bp, synthetic construct
  source 1..20: mol_type = other DNA
cttctactctcaagagaatc

SEQ ID NO: 2493 - DNA, 20 bp, synthetic construct
  source 1..20: mol_type = other DNA
cagattctcttgagagtaga

SEQ ID NO: 2494 - DNA, 20 bp, synthetic construct
  source 1..20: mol_type = other DNA
attctcttgagagtagaagg

SEQ ID NO: 2495 - DNA, 20 bp, synthetic construct
  source 1..20: mol_type = other DNA
tctcggatttgttaatcagg

SEQ ID NO: 2496 - DNA, 20 bp, synthetic construct
  source 1..20: mol_type = other DNA
tcctgattaacaaatccgag

SEQ ID NO: 2497 - DNA, 20 bp, synthetic construct
  source 1..20: mol_type = other DNA
acctctcggatttgttaatc

SEQ ID NO: 2498 - DNA, 20 bp, synthetic construct
  source 1..20: mol_type = other DNA
ttcatgagattagcacctct

SEQ ID NO: 2499 - DNA, 20 bp, synthetic construct
  source 1..20: mol_type = other DNA
gctaatctcatgaattctcc

SEQ ID NO: 2500 - DNA, 20 bp, synthetic construct
  source 1..20: mol_type = other DNA
tcatgaattctcccggacta

SEQ ID NO: 2501 - DNA, 20 bp, synthetic construct
  source 1..20: mol_type = other DNA
gctatatataaccatagtcc

SEQ ID NO: 2502 - DNA, 20 bp, synthetic construct
  source 1..20: mol_type = other DNA
agctatatataaccatagtc

SEQ ID NO: 2503 - DNA, 20 bp, synthetic construct
  source 1..20: mol_type = other DNA
tcagtgatctcatgtagctt

SEQ ID NO: 2504 - DNA, 20 bp, synthetic construct
  source 1..20: mol_type = other DNA
tgatctcatgtagcttaggc

SEQ ID NO: 2505 - DNA, 20 bp, synthetic construct
  source 1..20: mol_type = other DNA
ctcatgtagcttaggctggc

SEQ ID NO: 2506 - DNA, 20 bp, synthetic construct
  source 1..20: mol_type = other DNA
ttgagctcactatgaagcaa

SEQ ID NO: 2507 - DNA, 20 bp, synthetic construct
  source 1..20: mol_type = other DNA
aaggatgaccctgaacttct

SEQ ID NO: 2508 - DNA, 20 bp, synthetic construct
  source 1..20: mol_type = other DNA
caggaaaaccaagaagttca

SEQ ID NO: 2509 - DNA, 20 bp, synthetic construct
  source 1..20: mol_type = other DNA
gcaggaaaaccaagaagttc

SEQ ID NO: 2510 - DNA, 20 bp, synthetic construct
  source 1..20: mol_type = other DNA
agcacttggaagatgaaagc

SEQ ID NO: 2511 - DNA, 20 bp, synthetic construct
  source 1..20: mol_type = other DNA
attcttgtaatcgcagcact

SEQ ID NO: 2512 - DNA, 20 bp, synthetic construct
  source 1..20: mol_type = other DNA
gctgccatgtctagttcatg

SEQ ID NO: 2513 - DNA, 20 bp, synthetic construct
  source 1..20: mol_type = other DNA
agcaccacatgaactagaca

SEQ ID NO: 2514 - DNA, 20 bp, synthetic construct
  source 1..20: mol_type = other DNA
tgtctagttcatgtggtgct

SEQ ID NO: 2515 - DNA, 20 bp, synthetic construct
  source 1..20: mol_type = other DNA
gtctagttcatgtggtgcta

SEQ ID NO: 2516 - DNA, 20 bp, synthetic construct
  source 1..20: mol_type = other DNA
ggtgctagggatcaaccctg

SEQ ID NO: 2517 - DNA, 20 bp, synthetic construct
  source 1..20: mol_type = other DNA
ttaacatgcacaaagcctca

SEQ ID NO: 2518 - DNA, 20 bp, synthetic construct
  source 1..20: mol_type = other DNA
cttaacatgcacaaagcctc

SEQ ID NO: 2519 - DNA, 20 bp, synthetic construct
  source 1..20: mol_type = other DNA
attcttttgagtcagggtca

SEQ ID NO: 2520 - DNA, 20 bp, synthetic construct
  source 1..20: mol_type = other DNA
tattcttttgagtcagggtc

SEQ ID NO: 2521 - DNA, 20 bp, synthetic construct
  source 1..20: mol_type = other DNA
tgaccctgactcaaaagaat

SEQ ID NO: 2522 - DNA, 20 bp, synthetic construct
  source 1..20: mol_type = other DNA
gaccctgactcaaaagaata

SEQ ID NO: 2523 - DNA, 20 bp, synthetic construct
  source 1..20: mol_type = other DNA
accctgactcaaaagaatag

SEQ ID NO: 2524 - DNA, 20 bp, synthetic construct
  source 1..20: mol_type = other DNA
ccctgactcaaaagaatagg

SEQ ID NO: 2525 - DNA, 20 bp, synthetic construct
  source 1..20: mol_type = other DNA
ccccctattcttttgagtca

SEQ ID NO: 2526 - DNA, 20 bp, synthetic construct
  source 1..20: mol_type = other DNA
cctgactcaaaagaataggg

SEQ ID NO: 2527 - DNA, 20 bp, synthetic construct
  source 1..20: mol_type = other DNA
cccccctattcttttgagtc

SEQ ID NO: 2528 - DNA, 20 bp, synthetic construct
  source 1..20: mol_type = other DNA
ctgactcaaaagaatagggg

SEQ ID NO: 2529 - DNA, 20 bp, synthetic construct
  source 1..20: mol_type = other DNA
actcaaaagaataggggggg

SEQ ID NO: 2530 - DNA, 20 bp, synthetic construct
  source 1..20: mol_type = other DNA
aaaagaatagggggggagga

SEQ ID NO: 2531 - DNA, 20 bp, synthetic construct
  source 1..20: mol_type = other DNA
gaatagggggggaggaagga

SEQ ID NO: 2532 - DNA, 20 bp, synthetic construct
  source 1..20: mol_type = other DNA
agggggggaggaaggaagga

SEQ ID NO: 2533 - DNA, 20 bp, synthetic construct
  source 1..20: mol_type = other DNA
ggggaggaaggaaggaagga

SEQ ID NO: 2534 - DNA, 20 bp, synthetic construct
  source 1..20: mol_type = other DNA
aggaaggaaggaaggaagga

SEQ ID NO: 2535 - DNA, 20 bp, synthetic construct
  source 1..20: mol_type = other DNA
aggaaggaaggaaggaagga

SEQ ID NO: 2536 - DNA, 20 bp, synthetic construct
  source 1..20: mol_type = other DNA
ggaaggaaggaaggaaggaa

SEQ ID NO: 2537 - DNA, 20 bp, synthetic construct
  source 1..20: mol_type = other DNA
aggaaggaaggaaggaaggg

SEQ ID NO: 2538 - DNA, 20 bp, synthetic construct
  source 1..20: mol_type = other DNA
ggaaggaaggaaggaaggga

SEQ ID NO: 2539 - DNA, 20 bp, synthetic construct
  source 1..20: mol_type = other DNA
aggaaggaaggaagggaggg

SEQ ID NO: 2540 - DNA, 20 bp, synthetic construct
  source 1..20: mol_type = other DNA
ggaaggaaggaagggaggga

SEQ ID NO: 2541 - DNA, 20 bp, synthetic construct
  source 1..20: mol_type = other DNA
aggaaggaagggagggaggg

SEQ ID NO: 2542 - DNA, 20 bp, synthetic construct
  source 1..20: mol_type = other DNA
ggaaggaagggagggaggga

SEQ ID NO: 2543 - DNA, 20 bp, synthetic construct
  source 1..20: mol_type = other DNA
aggaagggagggagggaggg

SEQ ID NO: 2544 - DNA, 20 bp, synthetic construct
  source 1..20: mol_type = other DNA
ggaagggagggagggaggga

SEQ ID NO: 2545 - DNA, 20 bp, synthetic construct
  source 1..20: mol_type = other DNA
agggagggagggagggaggg

SEQ ID NO: 2546 - DNA, 20 bp, synthetic construct
  source 1..20: mol_type = other DNA
gggagggagggagggaggga

SEQ ID NO: 2547 - DNA, 20 bp, synthetic construct
  source 1..20: mol_type = other DNA
agggagggagggagggaggg

SEQ ID NO: 2548 - DNA, 20 bp, synthetic construct
  source 1..20: mol_type = other DNA
gggagggagggagggaggga

SEQ ID NO: 2549 - DNA, 20 bp, synthetic construct
  source 1..20: mol_type = other DNA
agggagggagggagggaggg

SEQ ID NO: 2550 - DNA, 20 bp, synthetic construct
  source 1..20: mol_type = other DNA
gggagggagggagggaggga

SEQ ID NO: 2551 - DNA, 20 bp, synthetic construct
  source 1..20: mol_type = other DNA
agggagggagggagggaggg

SEQ ID NO: 2552 - DNA, 20 bp, synthetic construct
  source 1..20: mol_type = other DNA
gggagggagggagggaggga

SEQ ID NO: 2553 - DNA, 20 bp, synthetic construct
  source 1..20: mol_type = other DNA
agggagggagggagggaggg

SEQ ID NO: 2554 - DNA, 20 bp, synthetic construct
  source 1..20: mol_type = other DNA
gggagggagggagggaggga

SEQ ID NO: 2555 - DNA, 20 bp, synthetic construct
  source 1..20: mol_type = other DNA
agggagggagggagggaggg

SEQ ID NO: 2556 - DNA, 20 bp, synthetic construct
  source 1..20: mol_type = other DNA
agggagggagggagggagga

SEQ ID NO: 2557 - DNA, 20 bp, synthetic construct
  source 1..20: mol_type = other DNA
gatgttgagaacaaaagcca

SEQ ID NO: 2558 - DNA, 20 bp, synthetic construct
  source 1..20: mol_type = other DNA
gaacaaaagccaaggccaac

SEQ ID NO: 2559 - DNA, 20 bp, synthetic construct
  source 1..20: mol_type = other DNA
gccaaggccaacaggtgagt

SEQ ID NO: 2560 - DNA, 20 bp, synthetic construct
  source 1..20: mol_type = other DNA
ccaaggccaacaggtgagtt

SEQ ID NO: 2561 - DNA, 20 bp, synthetic construct
  source 1..20: mol_type = other DNA
cccaactcacctgttggcct

SEQ ID NO: 2562 - DNA, 20 bp, synthetic construct
  source 1..20: mol_type = other DNA
ccaacaggtgagttgggatt

SEQ ID NO: 2563 - DNA, 20 bp, synthetic construct
  source 1..20: mol_type = other DNA
cctaatcccaactcacctgt

SEQ ID NO: 2564 - DNA, 20 bp, synthetic construct
  source 1..20: mol_type = other DNA
aaaagtccttttcatagcaa

SEQ ID NO: 2565 - DNA, 20 bp, synthetic construct
  source 1..20: mol_type = other DNA
aaagtccttttcatagcaaa

SEQ ID NO: 2566 - DNA, 20 bp, synthetic construct
  source 1..20: mol_type = other DNA
aagtccttttcatagcaaag

SEQ ID NO: 2567 - DNA, 20 bp, synthetic construct
  source 1..20: mol_type = other DNA
acatcccctttgctatgaaa

SEQ ID NO: 2568 - DNA, 20 bp, synthetic construct
  source 1..20: mol_type = other DNA
ttttcatagcaaaggggatg

SEQ ID NO: 2569 - DNA, 20 bp, synthetic construct
  source 1..20: mol_type = other DNA
gtggaagaagagaagttgac

SEQ ID NO: 2570 - DNA, 20 bp, synthetic construct
  source 1..20: mol_type = other DNA
agagaagttgacaggtaagt

SEQ ID NO: 2571 - DNA, 20 bp, synthetic construct
  source 1..20: mol_type = other DNA
gagaagttgacaggtaagta

SEQ ID NO: 2572 - DNA, 20 bp, synthetic construct
  source 1..20: mol_type = other DNA
agaaaaaagaaaaaaatctg

SEQ ID NO: 2573 - DNA, 20 bp, synthetic construct
  source 1..20: mol_type = other DNA
aagaaaaaaatctgtggacc

SEQ ID NO: 2574 - DNA, 20 bp, synthetic construct
  source 1..20: mol_type = other DNA
agaaaaaaatctgtggacca

SEQ ID NO: 2575 - DNA, 20 bp, synthetic construct
  source 1..20: mol_type = other DNA
aaaatctgtggaccagggca

SEQ ID NO: 2576 - DNA, 20 bp, synthetic construct
  source 1..20: mol_type = other DNA
ctgcgtttcttgccatgccc

SEQ ID NO: 2577 - DNA, 20 bp, synthetic construct
  source 1..20: mol_type = other DNA
gagcaaatgttcataaagag

SEQ ID NO: 2578 - DNA, 20 bp, synthetic construct
  source 1..20: mol_type = other DNA
caaatgttcataaagagagg

SEQ ID NO: 2579 - DNA, 20 bp, synthetic construct
  source 1..20: mol_type = other DNA
aaatgttcataaagagaggt

SEQ ID NO: 2580 - DNA, 20 bp, synthetic construct
  source 1..20: mol_type = other DNA
gttcataaagagaggtgggc

SEQ ID NO: 2581 - DNA, 20 bp, synthetic construct
  source 1..20: mol_type = other DNA
cataaagagaggtgggcagg

SEQ ID NO: 2582 - DNA, 20 bp, synthetic construct
  source 1..20: mol_type = other DNA
ggtgggcaggaggcagacca

SEQ ID NO: 2583 - DNA, 20 bp, synthetic construct
  source 1..20: mol_type = other DNA
tctgatgagtcttgagacca

SEQ ID NO: 2584 - DNA, 20 bp, synthetic construct
  source 1..20: mol_type = other DNA
caagactcatcagagagata

SEQ ID NO: 2585 - DNA, 20 bp, synthetic construct
  source 1..20: mol_type = other DNA
agagataaggcaatatcctg

SEQ ID NO: 2586 - DNA, 20 bp, synthetic construct
  source 1..20: mol_type = other DNA
tcctgaggagcacccatctg

SEQ ID NO: 2587 - DNA, 20 bp, synthetic construct
  source 1..20: mol_type = other DNA
cctgaggagcacccatctga

SEQ ID NO: 2588 - DNA, 20 bp, synthetic construct
  source 1..20: mol_type = other DNA
ccctcagatgggtgctcctc

SEQ ID NO: 2589 - DNA, 20 bp, synthetic construct
  source 1..20: mol_type = other DNA
ctgaggagcacccatctgag

SEQ ID NO: 2590 - DNA, 20 bp, synthetic construct
  source 1..20: mol_type = other DNA
ttgctcaacgcccctcagat

SEQ ID NO: 2591 - DNA, 20 bp, synthetic construct
  source 1..20: mol_type = other DNA
cttgctcaacgcccctcaga

SEQ ID NO: 2592 - DNA, 20 bp, synthetic construct
  source 1..20: mol_type = other DNA
tctgaggggcgttgagcaag

SEQ ID NO: 2593 - DNA, 20 bp, synthetic construct
  source 1..20: mol_type = other DNA
ctgaggggcgttgagcaagt

SEQ ID NO: 2594 - DNA, 20 bp, synthetic construct
  source 1..20: mol_type = other DNA
catttctctgcattcacaga

SEQ ID NO: 2595 - DNA, 20 bp, synthetic construct
  source 1..20: mol_type = other DNA
ttctctgcattcacagatgg

SEQ ID NO: 2596 - DNA, 20 bp, synthetic construct
  source 1..20: mol_type = other DNA
tgcaactatctttagcagtg

SEQ ID NO: 2597 - DNA, 20 bp, synthetic construct
  source 1..20: mol_type = other DNA
tctttagcagtgaggcatgc

SEQ ID NO: 2598 - DNA, 20 bp, synthetic construct
  source 1..20: mol_type = other DNA
ctttagcagtgaggcatgct

SEQ ID NO: 2599 - DNA, 20 bp, synthetic construct
  source 1..20: mol_type = other DNA
atgctgggtagtgctaagag

SEQ ID NO: 2600 - DNA, 20 bp, synthetic construct
  source 1..20: mol_type = other DNA
tgctgggtagtgctaagagc

SEQ ID NO: 2601 - DNA, 20 bp, synthetic construct
  source 1..20: mol_type = other DNA
tgggtagtgctaagagcggg

SEQ ID NO: 2602 - DNA, 20 bp, synthetic construct
  source 1..20: mol_type = other DNA
gggtagtgctaagagcgggc

SEQ ID NO: 2603 - DNA, 20 bp, synthetic construct
  source 1..20: mol_type = other DNA
ggtagtgctaagagcgggcg

SEQ ID NO: 2604 - DNA, 20 bp, synthetic construct
  source 1..20: mol_type = other DNA
ctaagagcgggcggggtctg

SEQ ID NO: 2605 - DNA, 20 bp, synthetic construct
  source 1..20: mol_type = other DNA
agcgggcggggtctgtggaa

SEQ ID NO: 2606 - DNA, 20 bp, synthetic construct
  source 1..20: mol_type = other DNA
gcggggtctgtggaatggag

SEQ ID NO: 2607 - DNA, 20 bp, synthetic construct
  source 1..20: mol_type = other DNA
aatgacgtggtaataaggag

SEQ ID NO: 2608 - DNA, 20 bp, synthetic construct
  source 1..20: mol_type = other DNA
agtaaaatgacgtggtaata

SEQ ID NO: 2609 - DNA, 20 bp, synthetic construct
  source 1..20: mol_type = other DNA
taatcaaaagtaaaatgacg

SEQ ID NO: 2610 - DNA, 20 bp, synthetic construct
  source 1..20: mol_type = other DNA
ctatgtatcttgcctcttga

SEQ ID NO: 2611 - DNA, 20 bp, synthetic construct
  source 1..20: mol_type = other DNA
gtacttgtgtgaccgtcaag

SEQ ID NO: 2612 - DNA, 20 bp, synthetic construct
  source 1..20: mol_type = other DNA
agtacttccagttgaagagt

SEQ ID NO: 2613 - DNA, 20 bp, synthetic construct
  source 1..20: mol_type = other DNA
tgtaatgcctactcttcaac

SEQ ID NO: 2614 - DNA, 20 bp, synthetic construct
  source 1..20: mol_type = other DNA
gttgaagagtaggcattaca

SEQ ID NO: 2615 - DNA, 20 bp, synthetic construct
  source 1..20: mol_type = other DNA
tctgcttccatgaatattct

SEQ ID NO: 2616 - DNA, 20 bp, synthetic construct
  source 1..20: mol_type = other DNA
ctgcttccatgaatattcta

SEQ ID NO: 2617 - DNA, 20 bp, synthetic construct
  source 1..20: mol_type = other DNA
aatgtgccctagaatattca

SEQ ID NO: 2618 - DNA, 20 bp, synthetic construct
  source 1..20: mol_type = other DNA
ctagggcacatttttattcc

SEQ ID NO: 2619 - DNA, 20 bp, synthetic construct
  source 1..20: mol_type = other DNA
tgctttcatatattttttcc

SEQ ID NO: 2620 - DNA, 20 bp, synthetic construct
  source 1..20: mol_type = other DNA
aaagcatttctaattatgaa

SEQ ID NO: 2621 - DNA, 20 bp, synthetic construct
  source 1..20: mol_type = other DNA
tttctaattatgaatggaat

SEQ ID NO: 2622 - DNA, 20 bp, synthetic construct
  source 1..20: mol_type = other DNA
ctaattatgaatggaattgg

SEQ ID NO: 2623 - DNA, 20 bp, synthetic construct
  source 1..20: mol_type = other DNA
tgaatggaattggtggttta

SEQ ID NO: 2624 - DNA, 20 bp, synthetic construct
  source 1..20: mol_type = other DNA
gaatggaattggtggtttat

SEQ ID NO: 2625 - DNA, 20 bp, synthetic construct
  source 1..20: mol_type = other DNA
aatggaattggtggtttatg

SEQ ID NO: 2626 - DNA, 20 bp, synthetic construct
  source 1..20: mol_type = other DNA
ggaacacatatgctcagcct

SEQ ID NO: 2627 - DNA, 20 bp, synthetic construct
  source 1..20: mol_type = other DNA
ggttttggtaatttattcca

SEQ ID NO: 2628 - DNA, 20 bp, synthetic construct
  source 1..20: mol_type = other DNA
ataaattaccaaaaccaaag

SEQ ID NO: 2629 - DNA, 20 bp, synthetic construct
  source 1..20: mol_type = other DNA
gagtctagcctctttggttt

SEQ ID NO: 2630 - DNA, 20 bp, synthetic construct
  source 1..20: mol_type = other DNA
agaagggagtctagcctctt

SEQ ID NO: 2631 - DNA, 20 bp, synthetic construct
  source 1..20: mol_type = other DNA
gcttctgttgatcggtagaa

SEQ ID NO: 2632 - DNA, 20 bp, synthetic construct
  source 1..20: mol_type = other DNA
tgcttctgttgatcggtaga

SEQ ID NO: 2633 - DNA, 20 bp, synthetic construct
  source 1..20: mol_type = other DNA
tcttatatgcttctgttgat

SEQ ID NO: 2634 - DNA, 20 bp, synthetic construct
  source 1..20: mol_type = other DNA
caacagaagcatataagagt

SEQ ID NO: 2635 - DNA, 20 bp, synthetic construct
  source 1..20: mol_type = other DNA
ttctctactctaccaacttg

SEQ ID NO: 2636 - DNA, 20 bp, synthetic construct
  source 1..20: mol_type = other DNA
ctactctaccaacttgtggt

SEQ ID NO: 2637 - DNA, 20 bp, synthetic construct
  source 1..20: mol_type = other DNA
tactctaccaacttgtggtt

SEQ ID NO: 2638 - DNA, 20 bp, synthetic construct
  source 1..20: mol_type = other DNA
aacaggacccaaccacaagt

SEQ ID NO: 2639 - DNA, 20 bp, synthetic construct
  source 1..20: mol_type = other DNA
gtcctgtttagaataataag

SEQ ID NO: 2640 - DNA, 20 bp, synthetic construct
  source 1..20: mol_type = other DNA
tgcctcttattattctaaac

SEQ ID NO: 2641 - DNA, 20 bp, synthetic construct
  source 1..20: mol_type = other DNA
gcatctacatgtagagctct

SEQ ID NO: 2642 - DNA, 20 bp, synthetic construct
  source 1..20: mol_type = other DNA
tctaggaagccattcaatgc

SEQ ID NO: 2643 - DNA, 20 bp, synthetic construct
  source 1..20: mol_type = other DNA
ggtttagatcctgcattgaa

SEQ ID NO: 2644 - DNA, 20 bp, synthetic construct
  source 1..20: mol_type = other DNA
tcaatgcaggatctaaacct

SEQ ID NO: 2645 - DNA, 20 bp, synthetic construct
  source 1..20: mol_type = other DNA
cacagacattgctaaagcca

SEQ ID NO: 2646 - DNA, 20 bp, synthetic construct
  source 1..20: mol_type = other DNA
tggctttagcaatgtctgtg

SEQ ID NO: 2647 - DNA, 20 bp, synthetic construct
  source 1..20: mol_type = other DNA
agcaatgtctgtgcggtact

SEQ ID NO: 2648 - DNA, 20 bp, synthetic construct
  source 1..20: mol_type = other DNA
caaagaaaaccaagatttat

SEQ ID NO: 2649 - DNA, 20 bp, synthetic construct
  source 1..20: mol_type = other DNA
aaaaccaagatttatcggaa

SEQ ID NO: 2650 - DNA, 20 bp, synthetic construct
  source 1..20: mol_type = other DNA
accaagatttatcggaatgg

SEQ ID NO: 2651 - DNA, 20 bp, synthetic construct
  source 1..20: mol_type = other DNA
tccaccattccgataaatct

SEQ ID NO: 2652 - DNA, 20 bp, synthetic construct
  source 1..20: mol_type = other DNA
ggtggacactgaaagtagac

SEQ ID NO: 2653 - DNA, 20 bp, synthetic construct
  source 1..20: mol_type = other DNA
acactgaaagtagacaggaa

SEQ ID NO: 2654 - DNA, 20 bp, synthetic construct
  source 1..20: mol_type = other DNA
cctagtgtgcagtgtgcaga

SEQ ID NO: 2655 - DNA, 20 bp, synthetic construct
  source 1..20: mol_type = other DNA
ccatctgcacactgcacact

SEQ ID NO: 2656 - DNA, 20 bp, synthetic construct
  source 1..20: mol_type = other DNA
gtgtgcagtgtgcagatgga

SEQ ID NO: 2657 - DNA, 20 bp, synthetic construct
  source 1..20: mol_type = other DNA
tgtgcagtgtgcagatggaa

SEQ ID NO: 2658 - DNA, 20 bp, synthetic construct
  source 1..20: mol_type = other DNA
tgcagatggaagggcagtgc

SEQ ID NO: 2659 - DNA, 20 bp, synthetic construct
  source 1..20: mol_type = other DNA
gcagatggaagggcagtgct

SEQ ID NO: 2660 - DNA, 20 bp, synthetic construct
  source 1..20: mol_type = other DNA
cagatggaagggcagtgctg

SEQ ID NO: 2661 - DNA, 20 bp, synthetic construct
  source 1..20: mol_type = other DNA
tggggagaatccattgcatt

SEQ ID NO: 2662 - DNA, 20 bp, synthetic construct
  source 1..20: mol_type = other DNA
cttcttctttccaaatgcaa

SEQ ID NO: 2663 - DNA, 20 bp, synthetic construct
  source 1..20: mol_type = other DNA
ttagcaaaagaaatcgcaga

SEQ ID NO: 2664 - DNA, 20 bp, synthetic construct
  source 1..20: mol_type = other DNA
attagcaaaagaaatcgcag

SEQ ID NO: 2665 - DNA, 20 bp, synthetic construct
  source 1..20: mol_type = other DNA
gcgatttcttttgctaatgc

SEQ ID NO: 2666 - DNA, 20 bp, synthetic construct
  source 1..20: mol_type = other DNA
aagcaagtactacagtgaaa

SEQ ID NO: 2667 - DNA, 20 bp, synthetic construct
  source 1..20: mol_type = other DNA
ttcactgtagtacttgcttg

SEQ ID NO: 2668 - DNA, 20 bp, synthetic construct
  source 1..20: mol_type = other DNA
actgtagtacttgcttgtgg

SEQ ID NO: 2669 - DNA, 20 bp, synthetic construct
  source 1..20: mol_type = other DNA
tgtggtggtttgaatgaaaa

SEQ ID NO: 2670 - DNA, 20 bp, synthetic construct
  source 1..20: mol_type = other DNA
tgaatgaaaatggtccccac

SEQ ID NO: 2671 - DNA, 20 bp, synthetic construct
  source 1..20: mol_type = other DNA
gttttcaaaaatagcctgtg

SEQ ID NO: 2672 - DNA, 20 bp, synthetic construct
  source 1..20: mol_type = other DNA
agttttcaaaaatagcctgt

SEQ ID NO: 2673 - DNA, 20 bp, synthetic construct
  source 1..20: mol_type = other DNA
aagttttcaaaaatagcctg

SEQ ID NO: 2674 - DNA, 20 bp, synthetic construct
  source 1..20: mol_type = other DNA
ttgaaaacttgatccccagt

SEQ ID NO: 2675 - DNA, 20 bp, synthetic construct
  source 1..20: mol_type = other DNA
ccccagttggtgaaactgtt

SEQ ID NO: 2676 - DNA, 20 bp, synthetic construct
  source 1..20: mol_type = other DNA
ccaaacagtttcaccaactg

SEQ ID NO: 2677 - DNA, 20 bp, synthetic construct
  source 1..20: mol_type = other DNA
tccaaacagtttcaccaact

SEQ ID NO: 2678 - DNA, 20 bp, synthetic construct
  source 1..20: mol_type = other DNA
ttccaaacagtttcaccaac

SEQ ID NO: 2679 - DNA, 20 bp, synthetic construct
  source 1..20: mol_type = other DNA
gttggtgaaactgtttggaa

SEQ ID NO: 2680 - DNA, 20 bp, synthetic construct
  source 1..20: mol_type = other DNA
gaaactgtttggaaaggatt

SEQ ID NO: 2681 - DNA, 20 bp, synthetic construct
  source 1..20: mol_type = other DNA
ttggaaaggattaggaagtg

SEQ ID NO: 2682 - DNA, 20 bp, synthetic construct
  source 1..20: mol_type = other DNA
attaggaagtgtggccttgc

SEQ ID NO: 2683 - DNA, 20 bp, synthetic construct
  source 1..20: mol_type = other DNA
aagtgtggccttgctggatg

SEQ ID NO: 2684 - DNA, 20 bp, synthetic construct
  source 1..20: mol_type = other DNA
ttgacagacctcatccagca

SEQ ID NO: 2685 - DNA, 20 bp, synthetic construct
  source 1..20: mol_type = other DNA
tgctggatgaggtctgtcaa

SEQ ID NO: 2686 - DNA, 20 bp, synthetic construct
  source 1..20: mol_type = other DNA
tggatgaggtctgtcaatgg

SEQ ID NO: 2687 - DNA, 20 bp, synthetic construct
  source 1..20: mol_type = other DNA
tgaggtctgtcaatggcgga

SEQ ID NO: 2688 - DNA, 20 bp, synthetic construct
  source 1..20: mol_type = other DNA
gagacagagagaggcacact

SEQ ID NO: 2689 - DNA, 20 bp, synthetic construct
  source 1..20: mol_type = other DNA
ggagacagagagaggcacac

SEQ ID NO: 2690 - DNA, 20 bp, synthetic construct
  source 1..20: mol_type = other DNA
aataagtaggagacagagag

SEQ ID NO: 2691 - DNA, 20 bp, synthetic construct
  source 1..20: mol_type = other DNA
tcatttttcaatcaataagt

SEQ ID NO: 2692 - DNA, 20 bp, synthetic construct
  source 1..20: mol_type = other DNA
aattctggatggcagagcaa

SEQ ID NO: 2693 - DNA, 20 bp, synthetic construct
  source 1..20: mol_type = other DNA
tgggtgattagaattctgga

SEQ ID NO: 2694 - DNA, 20 bp, synthetic construct
  source 1..20: mol_type = other DNA
gttttgggtgattagaattc

SEQ ID NO: 2695 - DNA, 20 bp, synthetic construct
  source 1..20: mol_type = other DNA
taattaggctatatggtttt

SEQ ID NO: 2696 - DNA, 20 bp, synthetic construct
  source 1..20: mol_type = other DNA
ttaattaggctatatggttt

SEQ ID NO: 2697 - DNA, 20 bp, synthetic construct
  source 1..20: mol_type = other DNA
cagtatttaattaggctata

SEQ ID NO: 2698 - DNA, 20 bp, synthetic construct
  source 1..20: mol_type = other DNA
tataaaaacagtatttaatt

SEQ ID NO: 2699 - DNA, 20 bp, synthetic construct
  source 1..20: mol_type = other DNA
actgtttttataagttacct

SEQ ID NO: 2700 - DNA, 20 bp, synthetic construct
  source 1..20: mol_type = other DNA
tttataagttaccttggtca

SEQ ID NO: 2701 - DNA, 20 bp, synthetic construct
  source 1..20: mol_type = other DNA
taccttggtcatggtacttt

SEQ ID NO: 2702 - DNA, 20 bp, synthetic construct
  source 1..20: mol_type = other DNA
atcctaaagtaccatgacca

SEQ ID NO: 2703 - DNA, 20 bp, synthetic construct
  source 1..20: mol_type = other DNA
tagttaagaaactaagacat

SEQ ID NO: 2704 - DNA, 20 bp, synthetic construct
  source 1..20: mol_type = other DNA
cttaaccaaaacaccacaga

SEQ ID NO: 2705 - DNA, 20 bp, synthetic construct
  source 1..20: mol_type = other DNA
ttaaccaaaacaccacagac

SEQ ID NO: 2706 - DNA, 20 bp, synthetic construct
  source 1..20: mol_type = other DNA
caagcccgtctgtggtgttt

SEQ ID NO: 2707 - DNA, 20 bp, synthetic construct
  source 1..20: mol_type = other DNA
gtcatatgcaagcccgtctg

SEQ ID NO: 2708 - DNA, 20 bp, synthetic construct
  source 1..20: mol_type = other DNA
gcatatgacaacagttctag

SEQ ID NO: 2709 - DNA, 20 bp, synthetic construct
  source 1..20: mol_type = other DNA
ccctgatcaaatgccctagc

SEQ ID NO: 2710 - DNA, 20 bp, synthetic construct
  source 1..20: mol_type = other DNA
cctgctagggcatttgatca

SEQ ID NO: 2711 - DNA, 20 bp, synthetic construct
  source 1..20: mol_type = other DNA
acctgctagggcatttgatc

SEQ ID NO: 2712 - DNA, 20 bp, synthetic construct
  source 1..20: mol_type = other DNA
atcagacacagaacctgcta

SEQ ID NO: 2713 - DNA, 20 bp, synthetic construct
  source 1..20: mol_type = other DNA
catcagacacagaacctgct

SEQ ID NO: 2714 - DNA, 20 bp, synthetic construct
  source 1..20: mol_type = other DNA
agcaggttctgtgtctgatg

SEQ ID NO: 2715 - DNA, 20 bp, synthetic construct
  source 1..20: mol_type = other DNA
gcaggttctgtgtctgatga

SEQ ID NO: 2716 - DNA, 20 bp, synthetic construct
  source 1..20: mol_type = other DNA
ctgtgtctgatgagggctgc

SEQ ID NO: 2717 - DNA, 20 bp, synthetic construct
  source 1..20: mol_type = other DNA
tgatgagggctgctggttca

SEQ ID NO: 2718 - DNA, 20 bp, synthetic construct
  source 1..20: mol_type = other DNA
gatgagggctgctggttcat

SEQ ID NO: 2719 - DNA, 20 bp, synthetic construct
  source 1..20: mol_type = other DNA
gagggctgctggttcatggg

SEQ ID NO: 2720 - DNA, 20 bp, synthetic construct
  source 1..20: mol_type = other DNA
ctttttctcagtgtccttac

SEQ ID NO: 2721 - DNA, 20 bp, synthetic construct
  source 1..20: mol_type = other DNA
tttctcagtgtccttacagg

SEQ ID NO: 2722 - DNA, 20 bp, synthetic construct
  source 1..20: mol_type = other DNA
tcagtgtccttacaggtgga

SEQ ID NO: 2723 - DNA, 20 bp, synthetic construct
  source 1..20: mol_type = other DNA
ctggataccttccacctgta

SEQ ID NO: 2724 - DNA, 20 bp, synthetic construct
  source 1..20: mol_type = other DNA
tggaaggtatccagctttct

SEQ ID NO: 2725 - DNA, 20 bp, synthetic construct
  source 1..20: mol_type = other DNA
aatataaggtccaagaaagc

SEQ ID NO: 2726 - DNA, 20 bp, synthetic construct
  source 1..20: mol_type = other DNA
ggaatgcgtgctttaatata

SEQ ID NO: 2727 - DNA, 20 bp, synthetic construct
  source 1..20: mol_type = other DNA
aagctatctactcacatcaa

SEQ ID NO: 2728 - DNA, 20 bp, synthetic construct
  source 1..20: mol_type = other DNA
gaggtgcttaaatcactttg

SEQ ID NO: 2729 - DNA, 20 bp, synthetic construct
  source 1..20: mol_type = other DNA
ggaggtgcttaaatcacttt

SEQ ID NO: 2730 - DNA, 20 bp, synthetic construct
  source 1..20: mol_type = other DNA
tggaggtgcttaaatcactt

SEQ ID NO: 2731 - DNA, 20 bp, synthetic construct
  source 1..20: mol_type = other DNA
cctccaaaaccctccgtctc

SEQ ID NO: 2732 - DNA, 20 bp, synthetic construct
  source 1..20: mol_type = other DNA
ccggagacggagggttttgg

SEQ ID NO: 2733 - DNA, 20 bp, synthetic construct
  source 1..20: mol_type = other DNA
catccggagacggagggttt

SEQ ID NO: 2734 - DNA, 20 bp, synthetic construct
  source 1..20: mol_type = other DNA
ggggagcatccggagacgga

SEQ ID NO: 2735 - DNA, 20 bp, synthetic construct
  source 1..20: mol_type = other DNA
gggggagcatccggagacgg

SEQ ID NO: 2736 - DNA, 20 bp, synthetic construct
  source 1..20: mol_type = other DNA
aatgggggagcatccggaga

SEQ ID NO: 2737 - DNA, 20 bp, synthetic construct
  source 1..20: mol_type = other DNA
gtctccggatgctcccccat

SEQ ID NO: 2738 - DNA, 20 bp, synthetic construct
  source 1..20: mol_type = other DNA
ttcaccaatgggggagcatc

SEQ ID NO: 2739 - DNA, 20 bp, synthetic construct
  source 1..20: mol_type = other DNA
tgaaatctgttcaccaatgg

SEQ ID NO: 2740 - DNA, 20 bp, synthetic construct
  source 1..20: mol_type = other DNA
ttgaaatctgttcaccaatg

SEQ ID NO: 2741 - DNA, 20 bp, synthetic construct
  source 1..20: mol_type = other DNA
gttgaaatctgttcaccaat

SEQ ID NO: 2742 - DNA, 20 bp, synthetic construct
  source 1..20: mol_type = other DNA
tgttgaaatctgttcaccaa

SEQ ID NO: 2743 - DNA, 20 bp, synthetic construct
  source 1..20: mol_type = other DNA
tttcaacatagcaattgagc

SEQ ID NO: 2744 - DNA, 20 bp, synthetic construct
  source 1..20: mol_type = other DNA
caacatagcaattgagcagg

SEQ ID NO: 2745 - DNA, 20 bp, synthetic construct
  source 1..20: mol_type = other DNA
tagcaattgagcaggaggaa

SEQ ID NO: 2746 - DNA, 20 bp, synthetic construct
  source 1..20: mol_type = other DNA
ctggctgtgatcaaataatt

SEQ ID NO: 2747 - DNA, 20 bp, synthetic construct
  source 1..20: mol_type = other DNA
tttgatcacagccagtactt

SEQ ID NO: 2748 - DNA, 20 bp, synthetic construct
  source 1..20: mol_type = other DNA
ttgggtgttcaccaaagtac

SEQ ID NO: 2749 - DNA, 20 bp, synthetic construct
  source 1..20: mol_type = other DNA
gtgaacacccaaacccagca

SEQ ID NO: 2750 - DNA, 20 bp, synthetic construct
  source 1..20: mol_type = other DNA
ttcagctccatgctgggttt

SEQ ID NO: 2751 - DNA, 20 bp, synthetic construct
  source 1..20: mol_type = other DNA
attcagctccatgctgggtt

SEQ ID NO: 2752 - DNA, 20 bp, synthetic construct
  source 1..20: mol_type = other DNA
cagatattcagctccatgct

SEQ ID NO: 2753 - DNA, 20 bp, synthetic construct
  source 1..20: mol_type = other DNA
acagatattcagctccatgc

SEQ ID NO: 2754 - DNA, 20 bp, synthetic construct
  source 1..20: mol_type = other DNA
ctgtaatctcagtatccagc

SEQ ID NO: 2755 - DNA, 20 bp, synthetic construct
  source 1..20: mol_type = other DNA
taatctcagtatccagcagg

SEQ ID NO: 2756 - DNA, 20 bp, synthetic construct
  source 1..20: mol_type = other DNA
agtatccagcaggtggatat

SEQ ID NO: 2757 - DNA, 20 bp, synthetic construct
  source 1..20: mol_type = other DNA
gtatccagcaggtggatatt

SEQ ID NO: 2758 - DNA, 20 bp, synthetic construct
  source 1..20: mol_type = other DNA
tatccagcaggtggatattg

SEQ ID NO: 2759 - DNA, 20 bp, synthetic construct
  source 1..20: mol_type = other DNA
attccccaatatccacctgc

SEQ ID NO: 2760 - DNA, 20 bp, synthetic construct
  source 1..20: mol_type = other DNA
attggggaattaagacttca

SEQ ID NO: 2761 - DNA, 20 bp, synthetic construct
  source 1..20: mol_type = other DNA
taagacttcaaggccagact

SEQ ID NO: 2762 - DNA, 20 bp, synthetic construct
  source 1..20: mol_type = other DNA
acttactatgtagccaagtc

SEQ ID NO: 2763 - DNA, 20 bp, synthetic construct
  source 1..20: mol_type = other DNA
tagtaagtttgatgccatcc

SEQ ID NO: 2764 - DNA, 20 bp, synthetic construct
  source 1..20: mol_type = other DNA
agtaagtttgatgccatcct

SEQ ID NO: 2765 - DNA, 20 bp, synthetic construct
  source 1..20: mol_type = other DNA
ggatctcatatagcccagga

SEQ ID NO: 2766 - DNA, 20 bp, synthetic construct
  source 1..20: mol_type = other DNA
aacaggatctcatatagccc

SEQ ID NO: 2767 - DNA, 20 bp, synthetic construct
  source 1..20: mol_type = other DNA
tatttgggggttttggaaac

SEQ ID NO: 2768 - DNA, 20 bp, synthetic construct
  source 1..20: mol_type = other DNA
ttgtttctatttgggggttt

SEQ ID NO: 2769 - DNA, 20 bp, synthetic construct
  source 1..20: mol_type = other DNA
tttttattgtttctatttgg

SEQ ID NO: 2770 - DNA, 20 bp, synthetic construct
  source 1..20: mol_type = other DNA
ttttttattgtttctatttg

SEQ ID NO: 2771 - DNA, 20 bp, synthetic construct
  source 1..20: mol_type = other DNA
tttttttattgtttctattt

SEQ ID NO: 2772 - DNA, 20 bp, synthetic construct
  source 1..20: mol_type = other DNA
atttttttattgtttctatt

SEQ ID NO: 2773 - DNA, 20 bp, synthetic construct
  source 1..20: mol_type = other DNA
aaatagaaacaataaaaaaa

SEQ ID NO: 2774 - DNA, 20 bp, synthetic construct
  source 1..20: mol_type = other DNA
tagggtagcagtgaacatga

SEQ ID NO: 2775 - DNA, 20 bp, synthetic construct
  source 1..20: mol_type = other DNA
atgttcactgctaccctaga

SEQ ID NO: 2776 - DNA, 20 bp, synthetic construct
  source 1..20: mol_type = other DNA
caagcaaaactgaccttcta

SEQ ID NO: 2777 - DNA, 20 bp, synthetic construct
  source 1..20: mol_type = other DNA
acaagcaaaactgaccttct

SEQ ID NO: 2778 - DNA, 20 bp, synthetic construct
  source 1..20: mol_type = other DNA
ttgtaacagatgactaacag

SEQ ID NO: 2779 - DNA, 20 bp, synthetic construct
  source 1..20: mol_type = other DNA
agatgactaacagaggaaca

SEQ ID NO: 2780 - DNA, 20 bp, synthetic construct
  source 1..20: mol_type = other DNA
ctaacagaggaacaaggtcc

SEQ ID NO: 2781 - DNA, 20 bp, synthetic construct
  source 1..20: mol_type = other DNA
agcatactggtagctcttcc

SEQ ID NO: 2782 - DNA, 20 bp, synthetic construct
  source 1..20: mol_type = other DNA
cagcatactggtagctcttc

SEQ ID NO: 2783 - DNA, 20 bp, synthetic construct
  source 1..20: mol_type = other DNA
cggaagagctaccagtatgc

SEQ ID NO: 2784 - DNA, 20 bp, synthetic construct
  source 1..20: mol_type = other DNA
ttcattggcagccagcatac

SEQ ID NO: 2785 - DNA, 20 bp, synthetic construct
  source 1..20: mol_type = other DNA
taagacttcagcagcttcat

SEQ ID NO: 2786 - DNA, 20 bp, synthetic construct
  source 1..20: mol_type = other DNA
gctgaagtcttagtagattt

SEQ ID NO: 2787 - DNA, 20 bp, synthetic construct
  source 1..20: mol_type = other DNA
cttagtagatttaggagcta

SEQ ID NO: 2788 - DNA, 20 bp, synthetic construct
  source 1..20: mol_type = other DNA
ctggggctgtgatggaagtc

SEQ ID NO: 2789 - DNA, 20 bp, synthetic construct
  source 1..20: mol_type = other DNA
tggtggtgctggggctgtga

SEQ ID NO: 2790 - DNA, 20 bp, synthetic construct
  source 1..20: mol_type = other DNA
tcacagccccagcaccacca

SEQ ID NO: 2791 - DNA, 20 bp, synthetic construct
  source 1..20: mol_type = other DNA
cacagccccagcaccaccat

SEQ ID NO: 2792 - DNA, 20 bp, synthetic construct
  source 1..20: mol_type = other DNA
cagtgcccatggtggtgctg

SEQ ID NO: 2793 - DNA, 20 bp, synthetic construct
  source 1..20: mol_type = other DNA
gcagtgcccatggtggtgct

SEQ ID NO: 2794 - DNA, 20 bp, synthetic construct
  source 1..20: mol_type = other DNA
ggcagtgcccatggtggtgc

SEQ ID NO: 2795 - DNA, 20 bp, synthetic construct
  source 1..20: mol_type = other DNA
ctgctgggcagtgcccatgg

SEQ ID NO: 2796 - DNA, 20 bp, synthetic construct
  source 1..20: mol_type = other DNA
agactgctgggcagtgccca

SEQ ID NO: 2797 - DNA, 20 bp, synthetic construct
  source 1..20: mol_type = other DNA
ctaaaagaagatagactgct

SEQ ID NO: 2798 - DNA, 20 bp, synthetic construct
  source 1..20: mol_type = other DNA
ccagcagtctatcttctttt

SEQ ID NO: 2799 - DNA, 20 bp, synthetic construct
  source 1..20: mol_type = other DNA
cctaaaagaagatagactgc

SEQ ID NO: 2800 - DNA, 20 bp, synthetic construct
  source 1..20: mol_type = other DNA
ctatcttcttttaggtcttc

SEQ ID NO: 2801 - DNA, 20 bp, synthetic construct
  source 1..20: mol_type = other DNA
tttaggtcttcaggtgtccc

SEQ ID NO: 2802 - DNA, 20 bp, synthetic construct
  source 1..20: mol_type = other DNA
ttaggtcttcaggtgtccct

SEQ ID NO: 2803 - DNA, 20 bp, synthetic construct
  source 1..20: mol_type = other DNA
gtgtccctgggtagagaaca

SEQ ID NO: 2804 - DNA, 20 bp, synthetic construct
  source 1..20: mol_type = other DNA
gaagccttgttctctaccca

SEQ ID NO: 2805 - DNA, 20 bp, synthetic construct
  source 1..20: mol_type = other DNA
agaagccttgttctctaccc

SEQ ID NO: 2806 - DNA, 20 bp, synthetic construct
  source 1..20: mol_type = other DNA
aacaaggcttctgcttgcat

SEQ ID NO: 2807 - DNA, 20 bp, synthetic construct
  source 1..20: mol_type = other DNA
acaaggcttctgcttgcata

SEQ ID NO: 2808 - DNA, 20 bp, synthetic construct
  source 1..20: mol_type = other DNA
gtgagactgtcactgtactg

SEQ ID NO: 2809 - DNA, 20 bp, synthetic construct
  source 1..20: mol_type = other DNA
tgtgagactgtcactgtact

SEQ ID NO: 2810 - DNA, 20 bp, synthetic construct
  source 1..20: mol_type = other DNA
ttgtgagactgtcactgtac

SEQ ID NO: 2811 - DNA, 20 bp, synthetic construct
  source 1..20: mol_type = other DNA
tcacaatgagtgcagcaatg

SEQ ID NO: 2812 - DNA, 20 bp, synthetic construct
  source 1..20: mol_type = other DNA
gcagcaatgtggccacagaa

SEQ ID NO: 2813 - DNA, 20 bp, synthetic construct
  source 1..20: mol_type = other DNA
cagcaatgtggccacagaac

SEQ ID NO: 2814 - DNA, 20 bp, synthetic construct
  source 1..20: mol_type = other DNA
agcaatgtggccacagaacg

SEQ ID NO: 2815 - DNA, 20 bp, synthetic construct
  source 1..20: mol_type = other DNA
acacacatttccccgttctg

SEQ ID NO: 2816 - DNA, 20 bp, synthetic construct
  source 1..20: mol_type = other DNA
tcaagctgaaagcttttcac

SEQ ID NO: 2817 - DNA, 20 bp, synthetic construct
  source 1..20: mol_type = other DNA
tctcttgctaaatgacaaag

SEQ ID NO: 2818 - DNA, 20 bp, synthetic construct
  source 1..20: mol_type = other DNA
ctaaatgacaaagtggttag

SEQ ID NO: 2819 - DNA, 20 bp, synthetic construct
  source 1..20: mol_type = other DNA
aatgacaaagtggttagagg

SEQ ID NO: 2820 - DNA, 20 bp, synthetic construct
  source 1..20: mol_type = other DNA
atgacaaagtggttagagga

SEQ ID NO: 2821 - DNA, 20 bp, synthetic construct
  source 1..20: mol_type = other DNA
gtgtagacaatgaaagctgt

SEQ ID NO: 2822 - DNA, 20 bp, synthetic construct
  source 1..20: mol_type = other DNA
agctttcattgtctacactc

SEQ ID NO: 2823 - DNA, 20 bp, synthetic construct
  source 1..20: mol_type = other DNA
tcttttgagaattttacagt

SEQ ID NO: 2824 - DNA, 20 bp, synthetic construct
  source 1..20: mol_type = other DNA
ctagtcaacacagaaataaa

SEQ ID NO: 2825 - DNA, 20 bp, synthetic construct
  source 1..20: mol_type = other DNA
tttgttttgttgaaaagaag

SEQ ID NO: 2826 - DNA, 20 bp, synthetic construct
  source 1..20: mol_type = other DNA
ttgttttgttgaaaagaagt

SEQ ID NO: 2827 - DNA, 20 bp, synthetic construct
  source 1..20: mol_type = other DNA
tgttttgttgaaaagaagtg

SEQ ID NO: 2828 - DNA, 20 bp, synthetic construct
  source 1..20: mol_type = other DNA
gttttgttgaaaagaagtgg

SEQ ID NO: 2829 - DNA, 20 bp, synthetic construct
  source 1..20: mol_type = other DNA
ttgaaaagaagtgggggttt

SEQ ID NO: 2830 - DNA, 20 bp, synthetic construct
  source 1..20: mol_type = other DNA
tgggggttttggtactgatg

SEQ ID NO: 2831 - DNA, 20 bp, synthetic construct
  source 1..20: mol_type = other DNA
gggggttttggtactgatga

SEQ ID NO: 2832 - DNA, 20 bp, synthetic construct
  source 1..20: mol_type = other DNA
ggggttttggtactgatgag

SEQ ID NO: 2833 - DNA, 20 bp, synthetic construct
  source 1..20: mol_type = other DNA
tatgttacttattcattctc

SEQ ID NO: 2834 - DNA, 20 bp, synthetic construct
  source 1..20: mol_type = other DNA
cttattcattctcaggttca

SEQ ID NO: 2835 - DNA, 20 bp, synthetic construct
  source 1..20: mol_type = other DNA
ttaatctatcatttgtcata

SEQ ID NO: 2836 - DNA, 20 bp, synthetic construct
  source 1..20: mol_type = other DNA
taataaaagcatgcaaatgc

SEQ ID NO: 2837 - DNA, 20 bp, synthetic construct
  source 1..20: mol_type = other DNA
tgcaaatgctggagctctgc

SEQ ID NO: 2838 - DNA, 20 bp, synthetic construct
  source 1..20: mol_type = other DNA
aaatgctggagctctgctgg

SEQ ID NO: 2839 - DNA, 20 bp, synthetic construct
  source 1..20: mol_type = other DNA
ggcggagtacctgatatgca

SEQ ID NO: 2840 - DNA, 20 bp, synthetic construct
  source 1..20: mol_type = other DNA
gatcttcatccttgcatatc

SEQ ID NO: 2841 - DNA, 20 bp, synthetic construct
  source 1..20: mol_type = other DNA
gcttttttatttgatttctg

SEQ ID NO: 2842 - DNA, 20 bp, synthetic construct
  source 1..20: mol_type = other DNA
agcttttttatttgatttct

SEQ ID NO: 2843 - DNA, 20 bp, synthetic construct
  source 1..20: mol_type = other DNA
cagcttttttatttgatttc

SEQ ID NO: 2844 - DNA, 20 bp, synthetic construct
  source 1..20: mol_type = other DNA
cagaaatcaaataaaaaagc

SEQ ID NO: 2845 - DNA, 20 bp, synthetic construct
  source 1..20: mol_type = other DNA
agaaatcaaataaaaaagct

SEQ ID NO: 2846 - DNA, 20 bp, synthetic construct
  source 1..20: mol_type = other DNA
taaaaaagctgggcatagtg

SEQ ID NO: 2847 - DNA, 20 bp, synthetic construct
  source 1..20: mol_type = other DNA
agctgggcatagtgaggaag

SEQ ID NO: 2848 - DNA, 20 bp, synthetic construct
  source 1..20: mol_type = other DNA
gcatagtgaggaagaggaga

SEQ ID NO: 2849 - DNA, 20 bp, synthetic construct
  source 1..20: mol_type = other DNA
catagtgaggaagaggagat

SEQ ID NO: 2850 - DNA, 20 bp, synthetic construct
  source 1..20: mol_type = other DNA
agtgaggaagaggagatggg

SEQ ID NO: 2851 - DNA, 20 bp, synthetic construct
  source 1..20: mol_type = other DNA
aggagatgggaggattcctg

SEQ ID NO: 2852 - DNA, 20 bp, synthetic construct
  source 1..20: mol_type = other DNA
gatgggaggattcctgtggc

SEQ ID NO: 2853 - DNA, 20 bp, synthetic construct
  source 1..20: mol_type = other DNA
ggaggattcctgtggctggc

SEQ ID NO: 2854 - DNA, 20 bp, synthetic construct
  source 1..20: mol_type = other DNA
ttagctgtccagccagccac

SEQ ID NO: 2855 - DNA, 20 bp, synthetic construct
  source 1..20: mol_type = other DNA
tggaaatagatgaataggct

SEQ ID NO: 2856 - DNA, 20 bp, synthetic construct
  source 1..20: mol_type = other DNA
tagcctattcatctatttcc

SEQ ID NO: 2857 - DNA, 20 bp, synthetic construct
  source 1..20: mol_type = other DNA
tggcctggaaatagatgaat

SEQ ID NO: 2858 - DNA, 20 bp, synthetic construct
  source 1..20: mol_type = other DNA
catctatttccaggccacta

SEQ ID NO: 2859 - DNA, 20 bp, synthetic construct
  source 1..20: mol_type = other DNA
atctatttccaggccactaa

SEQ ID NO: 2860 - DNA, 20 bp, synthetic construct
  source 1..20: mol_type = other DNA
atttccaggccactaaggga

SEQ ID NO: 2861 - DNA, 20 bp, synthetic construct
  source 1..20: mol_type = other DNA
ggtaccatcccttagtggcc

SEQ ID NO: 2862 - DNA, 20 bp, synthetic construct
  source 1..20: mol_type = other DNA
tttaaggtaccatcccttag

SEQ ID NO: 2863 - DNA, 20 bp, synthetic construct
  source 1..20: mol_type = other DNA
attattattgttatttttta

SEQ ID NO: 2864 - DNA, 20 bp, synthetic construct
  source 1..20: mol_type = other DNA
acaataataataaataaaaa

SEQ ID NO: 2865 - DNA, 20 bp, synthetic construct
  source 1..20: mol_type = other DNA
taataaataaaaaaggtagc

SEQ ID NO: 2866 - DNA, 20 bp, synthetic construct
  source 1..20: mol_type = other DNA
aaaaaggtagctggttcctg

SEQ ID NO: 2867 - DNA, 20 bp, synthetic construct
  source 1..20: mol_type = other DNA
tggttcctgaggagcatcta

SEQ ID NO: 2868 - DNA, 20 bp, synthetic construct
  source 1..20: mol_type = other DNA
gatatccttagatgctcctc

SEQ ID NO: 2869 - DNA, 20 bp, synthetic construct
  source 1..20: mol_type = other DNA
gtatgtgcacgtggagttaa

SEQ ID NO: 2870 - DNA, 20 bp, synthetic construct
  source 1..20: mol_type = other DNA
gtatacagtgtatgtgcacg

SEQ ID NO: 2871 - DNA, 20 bp, synthetic construct
  source 1..20: mol_type = other DNA
tgcacatacactgtatacac

SEQ ID NO: 2872 - DNA, 20 bp, synthetic construct
  source 1..20: mol_type = other DNA
tttttttggtaaaacttgat

SEQ ID NO: 2873 - DNA, 20 bp, synthetic construct
  source 1..20: mol_type = other DNA
tttttttttttttttttttt

SEQ ID NO: 2874 - DNA, 20 bp, synthetic construct
  source 1..20: mol_type = other DNA
aagaacactttattcactgt

SEQ ID NO: 2875 - DNA, 20 bp, synthetic construct
  source 1..20: mol_type = other DNA
aacactttattcactgttgg

SEQ ID NO: 2876 - DNA, 20 bp, synthetic construct
  source 1..20: mol_type = other DNA
acactttattcactgttggt

SEQ ID NO: 2877 - DNA, 20 bp, synthetic construct
  source 1..20: mol_type = other DNA
ctgttggtgggtatgtaaac

SEQ ID NO: 2878 - DNA, 20 bp, synthetic construct
  source 1..20: mol_type = other DNA
ctctgtgctgattttcatag

SEQ ID NO: 2879 - DNA, 20 bp, synthetic construct
  source 1..20: mol_type = other DNA
cactatgaaaatcagcacag

SEQ ID NO: 2880 - DNA, 20 bp, synthetic construct
  source 1..20: mol_type = other DNA
ttgttttgttggagtgggaa

SEQ ID NO: 2881 - DNA, 20 bp, synthetic construct
  source 1..20: mol_type = other DNA
tttgttttgttggagtggga

SEQ ID NO: 2882 - DNA, 20 bp, synthetic construct
  source 1..20: mol_type = other DNA
ttgttttgttttgttggagt

SEQ ID NO: 2883 - DNA, 20 bp, synthetic construct
  source 1..20: mol_type = other DNA
tttgttttgttttgttggag

SEQ ID NO: 2884 - DNA, 20 bp, synthetic construct
  source 1..20: mol_type = other DNA
tttgttttgttttgttttgt

SEQ ID NO: 2885 - DNA, 20 bp, synthetic construct
  source 1..20: mol_type = other DNA
gttctagttctagttctaga

SEQ ID NO: 2886 - DNA, 20 bp, synthetic construct
  source 1..20: mol_type = other DNA
agttctagttctagttctag

SEQ ID NO: 2887 - DNA, 20 bp, synthetic construct
  source 1..20: mol_type = other DNA
ctagaactactgcacgatcc

SEQ ID NO: 2888 - DNA, 20 bp, synthetic construct
  source 1..20: mol_type = other DNA
gatccaggtttaccactcct

SEQ ID NO: 2889 - DNA, 20 bp, synthetic construct
  source 1..20: mol_type = other DNA
atacctaggagtggtaaacc

SEQ ID NO: 2890 - DNA, 20 bp, synthetic construct
  source 1..20: mol_type = other DNA
tttgagtaaatacctaggag

SEQ ID NO: 2891 - DNA, 20 bp, synthetic construct
  source 1..20: mol_type = other DNA
actcctaggtatttactcaa

SEQ ID NO: 2892 - DNA, 20 bp, synthetic construct
  source 1..20: mol_type = other DNA
agtcctttgagtaaatacct

SEQ ID NO: 2893 - DNA, 20 bp, synthetic construct
  source 1..20: mol_type = other DNA
tatacgtcaacctgtgacag

SEQ ID NO: 2894 - DNA, 20 bp, synthetic construct
  source 1..20: mol_type = other DNA
gtatatgatgcctctgtcac

SEQ ID NO: 2895 - DNA, 20 bp, synthetic construct
  source 1..20: mol_type = other DNA
cagaggcatcatatacaagc

SEQ ID NO: 2896 - DNA, 20 bp, synthetic construct
  source 1..20: mol_type = other DNA
agaggcatcatatacaagca

SEQ ID NO: 2897 - DNA, 20 bp, synthetic construct
  source 1..20: mol_type = other DNA
catcatatacaagcagggag

SEQ ID NO: 2898 - DNA, 20 bp, synthetic construct
  source 1..20: mol_type = other DNA
catatacaagcagggagtgg

SEQ ID NO: 2899 - DNA, 20 bp, synthetic construct
  source 1..20: mol_type = other DNA
tgaggggtgggattaaaggc

SEQ ID NO: 2900 - DNA, 20 bp, synthetic construct
  source 1..20: mol_type = other DNA
tgcctttaatcccacccctc

SEQ ID NO: 2901 - DNA, 20 bp, synthetic construct
  source 1..20: mol_type = other DNA
ctcctgaggggtgggattaa

SEQ ID NO: 2902 - DNA, 20 bp, synthetic construct
  source 1..20: mol_type = other DNA
ctttaatcccacccctcagg

SEQ ID NO: 2903 - DNA, 20 bp, synthetic construct
  source 1..20: mol_type = other DNA
gactctgcctcctgaggggt

SEQ ID NO: 2904 - DNA, 20 bp, synthetic construct
  source 1..20: mol_type = other DNA
tgactctgcctcctgagggg

SEQ ID NO: 2905 - DNA, 20 bp, synthetic construct
  source 1..20: mol_type = other DNA
acccctcaggaggcagagtc

SEQ ID NO: 2906 - DNA, 20 bp, synthetic construct
  source 1..20: mol_type = other DNA
acctgactctgcctcctgag

SEQ ID NO: 2907 - DNA, 20 bp, synthetic construct
  source 1..20: mol_type = other DNA
tacctgactctgcctcctga

SEQ ID NO: 2908 - DNA, 20 bp, synthetic construct
  source 1..20: mol_type = other DNA
ctacctgactctgcctcctg

SEQ ID NO: 2909 - DNA, 20 bp, synthetic construct
  source 1..20: mol_type = other DNA
ggtagatctctgtgagttcg

SEQ ID NO: 2910 - DNA, 20 bp, synthetic construct
  source 1..20: mol_type = other DNA
ctgtgagttcgaggccagtt

SEQ ID NO: 2911 - DNA, 20 bp, synthetic construct
  source 1..20: mol_type = other DNA
actcactatgtagaccaaac

SEQ ID NO: 2912 - DNA, 20 bp, synthetic construct
  source 1..20: mol_type = other DNA
catatggctatatggtctta

SEQ ID NO: 2913 - DNA, 20 bp, synthetic construct
  source 1..20: mol_type = other DNA
cataagaccatatagccata

SEQ ID NO: 2914 - DNA, 20 bp, synthetic construct
  source 1..20: mol_type = other DNA
aagaccatatagccatatgg

SEQ ID NO: 2915 - DNA, 20 bp, synthetic construct
  source 1..20: mol_type = other DNA
agaccatatagccatatgga

SEQ ID NO: 2916 - DNA, 20 bp, synthetic construct
  source 1..20: mol_type = other DNA
gaccatatagccatatggag

SEQ ID NO: 2917 - DNA, 20 bp, synthetic construct
  source 1..20: mol_type = other DNA
accatatagccatatggagg

SEQ ID NO: 2918 - DNA, 20 bp, synthetic construct
  source 1..20: mol_type = other DNA
ccatatagccatatggaggg

SEQ ID NO: 2919 - DNA, 20 bp, synthetic construct
  source 1..20: mol_type = other DNA
cccccctccatatggctata

SEQ ID NO: 2920 - DNA, 20 bp, synthetic construct
  source 1..20: mol_type = other DNA
ctcacaatcccccctccata

SEQ ID NO: 2921 - DNA, 20 bp, synthetic construct
  source 1..20: mol_type = other DNA
gagagaattattaaatgaat

SEQ ID NO: 2922 - DNA, 20 bp, synthetic construct
  source 1..20: mol_type = other DNA
tatacactgtcttctttcat

SEQ ID NO: 2923 - DNA, 20 bp, synthetic construct
  source 1..20: mol_type = other DNA
cataggaaaaatgaacagaa

SEQ ID NO: 2924 - DNA, 20 bp, synthetic construct
  source 1..20: mol_type = other DNA
ataggaaaaatgaacagaaa

SEQ ID NO: 2925 - DNA, 20 bp, synthetic construct
  source 1..20: mol_type = other DNA
aacagaaagggagagatctt

SEQ ID NO: 2926 - DNA, 20 bp, synthetic construct
  source 1..20: mol_type = other DNA
acagaaagggagagatcttt

SEQ ID NO: 2927 - DNA, 20 bp, synthetic construct
  source 1..20: mol_type = other DNA
gaaagggagagatctttggg

SEQ ID NO: 2928 - DNA, 20 bp, synthetic construct
  source 1..20: mol_type = other DNA
aaagggagagatctttgggt

SEQ ID NO: 2929 - DNA, 20 bp, synthetic construct
  source 1..20: mol_type = other DNA
aagggagagatctttgggtg

SEQ ID NO: 2930 - DNA, 20 bp, synthetic construct
  source 1..20: mol_type = other DNA
atacatgacatgaaagcaga

SEQ ID NO: 2931 - DNA, 20 bp, synthetic construct
  source 1..20: mol_type = other DNA
tacatgacatgaaagcagaa

SEQ ID NO: 2932 - DNA, 20 bp, synthetic construct
  source 1..20: mol_type = other DNA
acatgacatgaaagcagaag

SEQ ID NO: 2933 - DNA, 20 bp, synthetic construct
  source 1..20: mol_type = other DNA
agcagaaggggattagttat

SEQ ID NO: 2934 - DNA, 20 bp, synthetic construct
  source 1..20: mol_type = other DNA
gaaggggattagttattgga

SEQ ID NO: 2935 - DNA, 20 bp, synthetic construct
  source 1..20: mol_type = other DNA
gggattagttattggaaggc

SEQ ID NO: 2936 - DNA, 20 bp, synthetic construct
  source 1..20: mol_type = other DNA
ggattagttattggaaggca

SEQ ID NO: 2937 - DNA, 20 bp, synthetic construct
  source 1..20: mol_type = other DNA
ttagttattggaaggcaggg

SEQ ID NO: 2938 - DNA, 20 bp, synthetic construct
  source 1..20: mol_type = other DNA
tagttattggaaggcaggga

SEQ ID NO: 2939 - DNA, 20 bp, synthetic construct
  source 1..20: mol_type = other DNA
tggaaggcagggagggaccc

SEQ ID NO: 2940 - DNA, 20 bp, synthetic construct
  source 1..20: mol_type = other DNA
aaggcagggagggacccagg

SEQ ID NO: 2941 - DNA, 20 bp, synthetic construct
  source 1..20: mol_type = other DNA
ggagggacccaggaggatga

SEQ ID NO: 2942 - DNA, 20 bp, synthetic construct
  source 1..20: mol_type = other DNA
gagggacccaggaggatgaa

SEQ ID NO: 2943 - DNA, 20 bp, synthetic construct
  source 1..20: mol_type = other DNA
tctcttcccttcatcctcct

SEQ ID NO: 2944 - DNA, 20 bp, synthetic construct
  source 1..20: mol_type = other DNA
ttctcttcccttcatcctcc

SEQ ID NO: 2945 - DNA, 20 bp, synthetic construct
  source 1..20: mol_type = other DNA
gatgaagggaagagaatgca

SEQ ID NO: 2946 - DNA, 20 bp, synthetic construct
  source 1..20: mol_type = other DNA
atgaagggaagagaatgcaa

SEQ ID NO: 2947 - DNA, 20 bp, synthetic construct
  source 1..20: mol_type = other DNA
gggaagagaatgcaagggaa

SEQ ID NO: 2948 - DNA, 20 bp, synthetic construct
  source 1..20: mol_type = other DNA
aatgcaagggaaaggagtaa

SEQ ID NO: 2949 - DNA, 20 bp, synthetic construct
  source 1..20: mol_type = other DNA
gcaagggaaaggagtaaagg

SEQ ID NO: 2950 - DNA, 20 bp, synthetic construct
  source 1..20: mol_type = other DNA
agggaaaggagtaaaggagg

SEQ ID NO: 2951 - DNA, 20 bp, synthetic construct
  source 1..20: mol_type = other DNA
gaaaggagtaaaggaggagg

SEQ ID NO: 2952 - DNA, 20 bp, synthetic construct
  source 1..20: mol_type = other DNA
agtaaaggaggaggaggtag

SEQ ID NO: 2953 - DNA, 20 bp, synthetic construct
  source 1..20: mol_type = other DNA
tattaattccagcacttgtg

SEQ ID NO: 2954 - DNA, 20 bp, synthetic construct
  source 1..20: mol_type = other DNA
taattccagcacttgtgagg

SEQ ID NO: 2955 - DNA, 20 bp, synthetic construct
  source 1..20: mol_type = other DNA
aattccagcacttgtgagga

SEQ ID NO: 2956 - DNA, 20 bp, synthetic construct
  source 1..20: mol_type = other DNA
attccagcacttgtgaggag

SEQ ID NO: 2957 - DNA, 20 bp, synthetic construct
  source 1..20: mol_type = other DNA
tgtcccctcctcacaagtgc

SEQ ID NO: 2958 - DNA, 20 bp, synthetic construct
  source 1..20: mol_type = other DNA
gacagagctctgtgagttca

SEQ ID NO: 2959 - DNA, 20 bp, synthetic construct
  source 1..20: mol_type = other DNA
tggaactgactatgcagagg

SEQ ID NO: 2960 - DNA, 20 bp, synthetic construct
  source 1..20: mol_type = other DNA
ctggaactgactatgcagag

SEQ ID NO: 2961 - DNA, 20 bp, synthetic construct
  source 1..20: mol_type = other DNA
ccctctgcatagtcagttcc

SEQ ID NO: 2962 - DNA, 20 bp, synthetic construct
  source 1..20: mol_type = other DNA
cctggaactgactatgcaga

SEQ ID NO: 2963 - DNA, 20 bp, synthetic construct
  source 1..20: mol_type = other DNA
tcctggaactgactatgcag

SEQ ID NO: 2964 - DNA, 20 bp, synthetic construct
  source 1..20: mol_type = other DNA
gtcagttccaggatagccaa

SEQ ID NO: 2965 - DNA, 20 bp, synthetic construct
  source 1..20: mol_type = other DNA
tatgtagccattggctatcc

SEQ ID NO: 2966 - DNA, 20 bp, synthetic construct
  source 1..20: mol_type = other DNA
gggtctcattatgtagccat

SEQ ID NO: 2967 - DNA, 20 bp, synthetic construct
  source 1..20: mol_type = other DNA
atgagaccctgtgtcagaga

SEQ ID NO: 2968 - DNA, 20 bp, synthetic construct
  source 1..20: mol_type = other DNA
agaccctgtgtcagagaagg

SEQ ID NO: 2969 - DNA, 20 bp, synthetic construct
  source 1..20: mol_type = other DNA
cggccaccttctctgacaca

SEQ ID NO: 2970 - DNA, 20 bp, synthetic construct
  source 1..20: mol_type = other DNA
cctgtgtcagagaaggtggc

SEQ ID NO: 2971 - DNA, 20 bp, synthetic construct
  source 1..20: mol_type = other DNA
ccggccaccttctctgacac

SEQ ID NO: 2972 - DNA, 20 bp, synthetic construct
  source 1..20: mol_type = other DNA
gtcagagaaggtggccggcg

SEQ ID NO: 2973 - DNA, 20 bp, synthetic construct
  source 1..20: mol_type = other DNA
tcagagaaggtggccggcga

SEQ ID NO: 2974 - DNA, 20 bp, synthetic construct
  source 1..20: mol_type = other DNA
taagcatcaatatccctcgc

SEQ ID NO: 2975 - DNA, 20 bp, synthetic construct
  source 1..20: mol_type = other DNA
taactcattcagctgtgtgg

SEQ ID NO: 2976 - DNA, 20 bp, synthetic construct
  source 1..20: mol_type = other DNA
gtttaactcattcagctgtg

SEQ ID NO: 2977 - DNA, 20 bp, synthetic construct
  source 1..20: mol_type = other DNA
agtgcaaaagtagcaggaac

SEQ ID NO: 2978 - DNA, 20 bp, synthetic construct
  source 1..20: mol_type = other DNA
attgaaagtgcaaaagtagc

SEQ ID NO: 2979 - DNA, 20 bp, synthetic construct
  source 1..20: mol_type = other DNA
atgctcccagattacttaca

SEQ ID NO: 2980 - DNA, 20 bp, synthetic construct
  source 1..20: mol_type = other DNA
aaattccatgtaagtaatct

SEQ ID NO: 2981 - DNA, 20 bp, synthetic construct
  source 1..20: mol_type = other DNA
taaattccatgtaagtaatc

SEQ ID NO: 2982 - DNA, 20 bp, synthetic construct
  source 1..20: mol_type = other DNA
atggaatttatattttattg

SEQ ID NO: 2983 - DNA, 20 bp, synthetic construct
  source 1..20: mol_type = other DNA
gaggtttgtctatgatgtac

SEQ ID NO: 2984 - DNA, 20 bp, synthetic construct
  source 1..20: mol_type = other DNA
ttggttgaaaatttttcttg

SEQ ID NO: 2985 - DNA, 20 bp, synthetic construct
  source 1..20: mol_type = other DNA
aaattttcaaccaatagtcc

SEQ ID NO: 2986 - DNA, 20 bp, synthetic construct
  source 1..20: mol_type = other DNA
gttatttttgcctggactat

SEQ ID NO: 2987 - DNA, 20 bp, synthetic construct
  source 1..20: mol_type = other DNA
aaaaagaggttatttttgcc

SEQ ID NO: 2988 - DNA, 20 bp, synthetic construct
  source 1..20: mol_type = other DNA
agaaagaaagaaagaaaaag

SEQ ID NO: 2989 - DNA, 20 bp, synthetic construct
  source 1..20: mol_type = other DNA
tctttttttttttttttttt

SEQ ID NO: 2990 - DNA, 20 bp, synthetic construct
  source 1..20: mol_type = other DNA
tttttttggttttttgaaac

SEQ ID NO: 2991 - DNA, 20 bp, synthetic construct
  source 1..20: mol_type = other DNA
ttttttggttttttgaaaca

SEQ ID NO: 2992 - DNA, 20 bp, synthetic construct
  source 1..20: mol_type = other DNA
agggtttctctgtatagccc

SEQ ID NO: 2993 - DNA, 20 bp, synthetic construct
  source 1..20: mol_type = other DNA
ctgtatagccctggctgtcc

SEQ ID NO: 2994 - DNA, 20 bp, synthetic construct
  source 1..20: mol_type = other DNA
agtgagttccaggacagcca

SEQ ID NO: 2995 - DNA, 20 bp, synthetic construct
  source 1..20: mol_type = other DNA
aagtgagttccaggacagcc

SEQ ID NO: 2996 - DNA, 20 bp, synthetic construct
  source 1..20: mol_type = other DNA
tggtgtacaaagtgagttcc

SEQ ID NO: 2997 - DNA, 20 bp, synthetic construct
  source 1..20: mol_type = other DNA
tggaactcactttgtacacc

SEQ ID NO: 2998 - DNA, 20 bp, synthetic construct
  source 1..20: mol_type = other DNA
actcactttgtacaccaggc

SEQ ID NO: 2999 - DNA, 20 bp, synthetic construct
  source 1..20: mol_type = other DNA
ttctgagttcgaggccagcc

SEQ ID NO: 3000 - DNA, 20 bp, synthetic construct
  source 1..20: mol_type = other DNA
caggtggatttctgagttcg

SEQ ID NO: 3001 - DNA, 20 bp, synthetic construct
  source 1..20: mol_type = other DNA
actcgggaggcagaggcagg

SEQ ID NO: 3002 - DNA, 20 bp, synthetic construct
  source 1..20: mol_type = other DNA
agcactcgggaggcagaggc

SEQ ID NO: 3003 - DNA, 20 bp, synthetic construct
  source 1..20: mol_type = other DNA
gcctctgcctcccgagtgct

SEQ ID NO: 3004 - DNA, 20 bp, synthetic construct
  source 1..20: mol_type = other DNA
tccgagcactcgggaggcag

SEQ ID NO: 3005 - DNA, 20 bp, synthetic construct
  source 1..20: mol_type = other DNA
ctttaatccgagcactcggg

SEQ ID NO: 3006 - DNA, 20 bp, synthetic construct
  source 1..20: mol_type = other DNA
ctcccgagtgctcggattaa

SEQ ID NO: 3007 - DNA, 20 bp, synthetic construct
  source 1..20: mol_type = other DNA
cgcctttaatccgagcactc

SEQ ID NO: 3008 - DNA, 20 bp, synthetic construct
  source 1..20: mol_type = other DNA
acgcctttaatccgagcact

SEQ ID NO: 3009 - DNA, 20 bp, synthetic construct
  source 1..20: mol_type = other DNA
tattttttgcgggacggtgg

SEQ ID NO: 3010 - DNA, 20 bp, synthetic construct
  source 1..20: mol_type = other DNA
ggttattttttgcgggacgg

SEQ ID NO: 3011 - DNA, 20 bp, synthetic construct
  source 1..20: mol_type = other DNA
acaggttattttttgcggga

SEQ ID NO: 3012 - DNA, 20 bp, synthetic construct
  source 1..20: mol_type = other DNA
aaaaacaggttattttttgc

SEQ ID NO: 3013 - DNA, 20 bp, synthetic construct
  source 1..20: mol_type = other DNA
caaaaacaggttattttttg

SEQ ID NO: 3014 - DNA, 20 bp, synthetic construct
  source 1..20: mol_type = other DNA
ataattaaaacaacaaaaac

SEQ ID NO: 3015 - DNA, 20 bp, synthetic construct
  source 1..20: mol_type = other DNA
tttttaagattttatgtgta

SEQ ID NO: 3016 - DNA, 20 bp, synthetic construct
  source 1..20: mol_type = other DNA
ttttaagattttatgtgtat

SEQ ID NO: 3017 - DNA, 20 bp, synthetic construct
  source 1..20: mol_type = other DNA
ctgtgtaccacttgtatgct

SEQ ID NO: 3018 - DNA, 20 bp, synthetic construct
  source 1..20: mol_type = other DNA
ttgggcaccaagcatacaag

SEQ ID NO: 3019 - DNA, 20 bp, synthetic construct
  source 1..20: mol_type = other DNA
tgtatgcttggtgcccaaga

SEQ ID NO: 3020 - DNA, 20 bp, synthetic construct
  source 1..20: mol_type = other DNA
tgatctgttctgtccttctt

SEQ ID NO: 3021 - DNA, 20 bp, synthetic construct
  source 1..20: mol_type = other DNA
atgatctgttctgtccttct

SEQ ID NO: 3022 - DNA, 20 bp, synthetic construct
  source 1..20: mol_type = other DNA
agaaggacagaacagatcat

SEQ ID NO: 3023 - DNA, 20 bp, synthetic construct
  source 1..20: mol_type = other DNA
gaaggacagaacagatcata

SEQ ID NO: 3024 - DNA, 20 bp, synthetic construct
  source 1..20: mol_type = other DNA
gaacagatcatagggtttcc

SEQ ID NO: 3025 - DNA, 20 bp, synthetic construct
  source 1..20: mol_type = other DNA
aacagatcatagggtttcct

SEQ ID NO: 3026 - DNA, 20 bp, synthetic construct
  source 1..20: mol_type = other DNA
tttcctgggataagagttat

SEQ ID NO: 3027 - DNA, 20 bp, synthetic construct
  source 1..20: mol_type = other DNA
actcctataactcttatccc

SEQ ID NO: 3028 - DNA, 20 bp, synthetic construct
  source 1..20: mol_type = other DNA
gatgactgtaagccaccaag

SEQ ID NO: 3029 - DNA, 20 bp, synthetic construct
  source 1..20: mol_type = other DNA
gtaagccaccaagtggacgc

SEQ ID NO: 3030 - DNA, 20 bp, synthetic construct
  source 1..20: mol_type = other DNA
taagccaccaagtggacgct

SEQ ID NO: 3031 - DNA, 20 bp, synthetic construct
  source 1..20: mol_type = other DNA
aattcccagcgtccacttgg

SEQ ID NO: 3032 - DNA, 20 bp, synthetic construct
  source 1..20: mol_type = other DNA
ttcaattcccagcgtccact

SEQ ID NO: 3033 - DNA, 20 bp, synthetic construct
  source 1..20: mol_type = other DNA
ggacgctgggaattgaacct

SEQ ID NO: 3034 - DNA, 20 bp, synthetic construct
  source 1..20: mol_type = other DNA
ggaattgaaccttggttagc

SEQ ID NO: 3035 - DNA, 20 bp, synthetic construct
  source 1..20: mol_type = other DNA
gacactcttccagctaacca

SEQ ID NO: 3036 - DNA, 20 bp, synthetic construct
  source 1..20: mol_type = other DNA
gggactggaattaaaaatac

SEQ ID NO: 3037 - DNA, 20 bp, synthetic construct
  source 1..20: mol_type = other DNA
catagacaaacaacggggac

SEQ ID NO: 3038 - DNA, 20 bp, synthetic construct
  source 1..20: mol_type = other DNA
atcttcatagacaaacaacg

SEQ ID NO: 3039 - DNA, 20 bp, synthetic construct
  source 1..20: mol_type = other DNA
aatcttcatagacaaacaac

SEQ ID NO: 3040 - DNA, 20 bp, synthetic construct
  source 1..20: mol_type = other DNA
aaatcttcatagacaaacaa

SEQ ID NO: 3041 - DNA, 20 bp, synthetic construct
  source 1..20: mol_type = other DNA
ttgtctatgaagattttgct

SEQ ID NO: 3042 - DNA, 20 bp, synthetic construct
  source 1..20: mol_type = other DNA
ttttgcttggtagtccagtc

SEQ ID NO: 3043 - DNA, 20 bp, synthetic construct
  source 1..20: mol_type = other DNA
ccagtctggctttaagaaac

SEQ ID NO: 3044 - DNA, 20 bp, synthetic construct
  source 1..20: mol_type = other DNA
cctgtttcttaaagccagac

SEQ ID NO: 3045 - DNA, 20 bp, synthetic construct
  source 1..20: mol_type = other DNA
cagtctggctttaagaaaca

SEQ ID NO: 3046 - DNA, 20 bp, synthetic construct
  source 1..20: mol_type = other DNA
aacagggtctcatgcatccc

SEQ ID NO: 3047 - DNA, 20 bp, synthetic construct
  source 1..20: mol_type = other DNA
atggaagtctgagcaagcca

SEQ ID NO: 3048 - DNA, 20 bp, synthetic construct
  source 1..20: mol_type = other DNA
catggaagtctgagcaagcc

SEQ ID NO: 3049 - DNA, 20 bp, synthetic construct
  source 1..20: mol_type = other DNA
ctcagacttccatgcagctg

SEQ ID NO: 3050 - DNA, 20 bp, synthetic construct
  source 1..20: mol_type = other DNA
gacttccatgcagctgagga

SEQ ID NO: 3051 - DNA, 20 bp, synthetic construct
  source 1..20: mol_type = other DNA
taaagccatcctcagctgca

SEQ ID NO: 3052 - DNA, 20 bp, synthetic construct
  source 1..20: mol_type = other DNA
tctacgaggaaaaggcagga

SEQ ID NO: 3053 - DNA, 20 bp, synthetic construct
  source 1..20: mol_type = other DNA
ctctacgaggaaaaggcagg

SEQ ID NO: 3054 - DNA, 20 bp, synthetic construct
  source 1..20: mol_type = other DNA
gcactctacgaggaaaaggc

SEQ ID NO: 3055 - DNA, 20 bp, synthetic construct
  source 1..20: mol_type = other DNA
ctcagcactctacgaggaaa

SEQ ID NO: 3056 - DNA, 20 bp, synthetic construct
  source 1..20: mol_type = other DNA
tgtaatctcagcactctacg

SEQ ID NO: 3057 - DNA, 20 bp, synthetic construct
  source 1..20: mol_type = other DNA
gagaagtctgctggtggcac

SEQ ID NO: 3058 - DNA, 20 bp, synthetic construct
  source 1..20: mol_type = other DNA
tgttaggagaagtctgctgg

SEQ ID NO: 3059 - DNA, 20 bp, synthetic construct
  source 1..20: mol_type = other DNA
tcttgttaggagaagtctgc

SEQ ID NO: 3060 - DNA, 20 bp, synthetic construct
  source 1..20: mol_type = other DNA
gacttctcctaacaagaatg

SEQ ID NO: 3061 - DNA, 20 bp, synthetic construct
  source 1..20: mol_type = other DNA
tcctaacaagaatgtggcac

SEQ ID NO: 3062 - DNA, 20 bp, synthetic construct
  source 1..20: mol_type = other DNA
cctaacaagaatgtggcaca

SEQ ID NO: 3063 - DNA, 20 bp, synthetic construct
  source 1..20: mol_type = other DNA
ccctgtgccacattcttgtt

SEQ ID NO: 3064 - DNA, 20 bp, synthetic construct
  source 1..20: mol_type = other DNA
aacaagaatgtggcacaggg

SEQ ID NO: 3065 - DNA, 20 bp, synthetic construct
  source 1..20: mol_type = other DNA
atgtggcacagggaggcaac

SEQ ID NO: 3066 - DNA, 20 bp, synthetic construct
  source 1..20: mol_type = other DNA
tgtggcacagggaggcaact

SEQ ID NO: 3067 - DNA, 20 bp, synthetic construct
  source 1..20: mol_type = other DNA
gaggcaactgggaatcaaac

SEQ ID NO: 3068 - DNA, 20 bp, synthetic construct
  source 1..20: mol_type = other DNA
caactgggaatcaaacagga

SEQ ID NO: 3069 - DNA, 20 bp, synthetic construct
  source 1..20: mol_type = other DNA
ctgggaatcaaacaggaagg

SEQ ID NO: 3070 - DNA, 20 bp, synthetic construct
  source 1..20: mol_type = other DNA
aaacaggaaggaggagtaaa

SEQ ID NO: 3071 - DNA, 20 bp, synthetic construct
  source 1..20: mol_type = other DNA
aggaaggaggagtaaaagga

SEQ ID NO: 3072 - DNA, 20 bp, synthetic construct
  source 1..20: mol_type = other DNA
ggaaggaggagtaaaaggaa

SEQ ID NO: 3073 - DNA, 20 bp, synthetic construct
  source 1..20: mol_type = other DNA
gaaggaggagtaaaaggaag

SEQ ID NO: 3074 - DNA, 20 bp, synthetic construct
  source 1..20: mol_type = other DNA
ggaggagtaaaaggaagggg

SEQ ID NO: 3075 - DNA, 20 bp, synthetic construct
  source 1..20: mol_type = other DNA
gagtaaaaggaaggggagga

SEQ ID NO: 3076 - DNA, 20 bp, synthetic construct
  source 1..20: mol_type = other DNA
aaaggaaggggaggaaggag

SEQ ID NO: 3077 - DNA, 20 bp, synthetic construct
  source 1..20: mol_type = other DNA
gggaggaaggagaggagaag

SEQ ID NO: 3078 - DNA, 20 bp, synthetic construct
  source 1..20: mol_type = other DNA
ggaaggagaggagaagtggc

SEQ ID NO: 3079 - DNA, 20 bp, synthetic construct
  source 1..20: mol_type = other DNA
aggagaggagaagtggcagg

SEQ ID NO: 3080 - DNA, 20 bp, synthetic construct
  source 1..20: mol_type = other DNA
gtggcaggaggagaagaaaa

SEQ ID NO: 3081 - DNA, 20 bp, synthetic construct
  source 1..20: mol_type = other DNA
gcaggaggagaagaaaaagg

SEQ ID NO: 3082 - DNA, 20 bp, synthetic construct
  source 1..20: mol_type = other DNA
ggaggagaagaaaaaggagg

SEQ ID NO: 3083 - DNA, 20 bp, synthetic construct
  source 1..20: mol_type = other DNA
agaaaaaggaggcggagaaa

SEQ ID NO: 3084 - DNA, 20 bp, synthetic construct
  source 1..20: mol_type = other DNA
aaaaggaggcggagaaaagg

SEQ ID NO: 3085 - DNA, 20 bp, synthetic construct
  source 1..20: mol_type = other DNA
aggcggagaaaaggtggtag

SEQ ID NO: 3086 - DNA, 20 bp, synthetic construct
  source 1..20: mol_type = other DNA
cggagaaaaggtggtagtgg

SEQ ID NO: 3087 - DNA, 20 bp, synthetic construct
  source 1..20: mol_type = other DNA
agaaaaggtggtagtggtgg

SEQ ID NO: 3088 - DNA, 20 bp, synthetic construct
  source 1..20: mol_type = other DNA
ggtggtagtggtggaggaag

SEQ ID NO: 3089 - DNA, 20 bp, synthetic construct
  source 1..20: mol_type = other DNA
ggtagtggtggaggaagagg

SEQ ID NO: 3090 - DNA, 20 bp, synthetic construct
  source 1..20: mol_type = other DNA
agtggtggaggaagaggagg

SEQ ID NO: 3091 - DNA, 20 bp, synthetic construct
  source 1..20: mol_type = other DNA
ggtggaggaagaggaggagg

SEQ ID NO: 3092 - DNA, 20 bp, synthetic construct
  source 1..20: mol_type = other DNA
ggaggaagaggaggaggagg

SEQ ID NO: 3093 - DNA, 20 bp, synthetic construct
  source 1..20: mol_type = other DNA
ggaagaggaggaggaggagg

SEQ ID NO: 3094 - DNA, 20 bp, synthetic construct
  source 1..20: mol_type = other DNA
agaggaggaggaggaggagg

SEQ ID NO: 3095 - DNA, 20 bp, synthetic construct
  source 1..20: mol_type = other DNA
ggaggaggaggaggaggagg

SEQ ID NO: 3096 - DNA, 20 bp, synthetic construct
  source 1..20: mol_type = other DNA
ggaggaggaggaggaggagg

SEQ ID NO: 3097 - DNA, 20 bp, synthetic construct
  source 1..20: mol_type = other DNA
gaggaggaggaggaggagga

SEQ ID NO: 3098 - DNA, 20 bp, synthetic construct
  source 1..20: mol_type = other DNA
aggaggaggaggaggaggag

SEQ ID NO: 3099 - DNA, 20 bp, synthetic construct
  source 1..20: mol_type = other DNA
ggaggaggaggaggaggagg

SEQ ID NO: 3100 - DNA, 20 bp, synthetic construct
  source 1..20: mol_type = other DNA
gagggggacttaatcagtaa

SEQ ID NO: 3101 - DNA, 20 bp, synthetic construct
  source 1..20: mol_type = other DNA
acttaatcagtaaaggaaaa

SEQ ID NO: 3102 - DNA, 20 bp, synthetic construct
  source 1..20: mol_type = other DNA
aaaaggctgagctcagtcct

SEQ ID NO: 3103 - DNA, 20 bp, synthetic construct
  source 1..20: mol_type = other DNA
ctcagtccttggaacctaca

SEQ ID NO: 3104 - DNA, 20 bp, synthetic construct
  source 1..20: mol_type = other DNA
gtccttggaacctacatggt

SEQ ID NO: 3105 - DNA, 20 bp, synthetic construct
  source 1..20: mol_type = other DNA
ctcctaccatgtaggttcca

SEQ ID NO: 3106 - DNA, 20 bp, synthetic construct
  source 1..20: mol_type = other DNA
ctcattctctcctaccatgt

SEQ ID NO: 3107 - DNA, 20 bp, synthetic construct
  source 1..20: mol_type = other DNA
gtttcctctgatccccacac

SEQ ID NO: 3108 - DNA, 20 bp, synthetic construct
  source 1..20: mol_type = other DNA
tgctccagtgtggggatcag

SEQ ID NO: 3109 - DNA, 20 bp, synthetic construct
  source 1..20: mol_type = other DNA
tgatccccacactggagcaa

SEQ ID NO: 3110 - DNA, 20 bp, synthetic construct
  source 1..20: mol_type = other DNA
ggcaccattgctccagtgtg

SEQ ID NO: 3111 - DNA, 20 bp, synthetic construct
  source 1..20: mol_type = other DNA
tggcaccattgctccagtgt

SEQ ID NO: 3112 - DNA, 20 bp, synthetic construct
  source 1..20: mol_type = other DNA
atggcaccattgctccagtg

SEQ ID NO: 3113 - DNA, 20 bp, synthetic construct
  source 1..20: mol_type = other DNA
gaagtgggagagtgatgtga

SEQ ID NO: 3114 - DNA, 20 bp, synthetic construct
  source 1..20: mol_type = other DNA
tgtgaggagttgggtgaagt

SEQ ID NO: 3115 - DNA, 20 bp, synthetic construct
  source 1..20: mol_type = other DNA
ttgtgaggagttgggtgaag

SEQ ID NO: 3116 - DNA, 20 bp, synthetic construct
  source 1..20: mol_type = other DNA
ttttatttttgtgaggagtt

SEQ ID NO: 3117 - DNA, 20 bp, synthetic construct
  source 1..20: mol_type = other DNA
tttttatttttgtgaggagt

SEQ ID NO: 3118 - DNA, 20 bp, synthetic construct
  source 1..20: mol_type = other DNA
ttttgttttttatttttgtg

SEQ ID NO: 3119 - DNA, 20 bp, synthetic construct
  source 1..20: mol_type = other DNA
ttaaaaaagaaagctgtagc

SEQ ID NO: 3120 - DNA, 20 bp, synthetic construct
  source 1..20: mol_type = other DNA
taaaaaagaaagctgtagcc

SEQ ID NO: 3121 - DNA, 20 bp, synthetic construct
  source 1..20: mol_type = other DNA
aagaaagctgtagccgggcg

SEQ ID NO: 3122 - DNA, 20 bp, synthetic construct
  source 1..20: mol_type = other DNA
aaagctgtagccgggcgtgg

SEQ ID NO: 3123 - DNA, 20 bp, synthetic construct
  source 1..20: mol_type = other DNA
aaagtgtgtgccaccacgcc

SEQ ID NO: 3124 - DNA, 20 bp, synthetic construct
  source 1..20: mol_type = other DNA
gtggcacacacttttaatcc

SEQ ID NO: 3125 - DNA, 20 bp, synthetic construct
  source 1..20: mol_type = other DNA
acacttttaatcccggcact

SEQ ID NO: 3126 - DNA, 20 bp, synthetic construct
  source 1..20: mol_type = other DNA
cacttttaatcccggcactt

SEQ ID NO: 3127 - DNA, 20 bp, synthetic construct
  source 1..20: mol_type = other DNA
ttttaatcccggcacttggg

SEQ ID NO: 3128 - DNA, 20 bp, synthetic construct
  source 1..20: mol_type = other DNA
tcccggcacttgggaggcag

SEQ ID NO: 3129 - DNA, 20 bp, synthetic construct
  source 1..20: mol_type = other DNA
gcctctgcctcccaagtgcc

SEQ ID NO: 3130 - DNA, 20 bp, synthetic construct
  source 1..20: mol_type = other DNA
tgcctctgcctcccaagtgc

SEQ ID NO: 3131 - DNA, 20 bp, synthetic construct
  source 1..20: mol_type = other DNA
acttgggaggcagaggcaag

SEQ ID NO: 3132 - DNA, 20 bp, synthetic construct
  source 1..20: mol_type = other DNA
caagcggatttctgagttcg

SEQ ID NO: 3133 - DNA, 20 bp, synthetic construct
  source 1..20: mol_type = other DNA
ttctgagttcgaggccagct

SEQ ID NO: 3134 - DNA, 20 bp, synthetic construct
  source 1..20: mol_type = other DNA
actcactttgtagaccaagc

SEQ ID NO: 3135 - DNA, 20 bp, synthetic construct
  source 1..20: mol_type = other DNA
tggtctacaaagtgagttcc

SEQ ID NO: 3136 - DNA, 20 bp, synthetic construct
  source 1..20: mol_type = other DNA
aagtgagttccaggacagcc

SEQ ID NO: 3137 - DNA, 20 bp, synthetic construct
  source 1..20: mol_type = other DNA
agtgagttccaggacagcca

SEQ ID NO: 3138 - DNA, 20 bp, synthetic construct
  source 1..20: mol_type = other DNA
ctgtgtagccctggctgtcc

SEQ ID NO: 3139 - DNA, 20 bp, synthetic construct
  source 1..20: mol_type = other DNA
agggtttctctgtgtagccc

SEQ ID NO: 3140 - DNA, 20 bp, synthetic construct
  source 1..20: mol_type = other DNA
tcttttggtttttcaagaca

SEQ ID NO: 3141 - DNA, 20 bp, synthetic construct
  source 1..20: mol_type = other DNA
ttcttttggtttttcaagac

SEQ ID NO: 3142 - DNA, 20 bp, synthetic construct
  source 1..20: mol_type = other DNA
acagctttctttttttcttt

SEQ ID NO: 3143 - DNA, 20 bp, synthetic construct
  source 1..20: mol_type = other DNA
tatattaatatagcaaagca

SEQ ID NO: 3144 - DNA, 20 bp, synthetic construct
  source 1..20: mol_type = other DNA
atatattaatatagcaaagc

SEQ ID NO: 3145 - DNA, 20 bp, synthetic construct
  source 1..20: mol_type = other DNA
tgttttttcttatagaatta

SEQ ID NO: 3146 - DNA, 20 bp, synthetic construct
  source 1..20: mol_type = other DNA
ttctggagggaggaaaagga

SEQ ID NO: 3147 - DNA, 20 bp, synthetic construct
  source 1..20: mol_type = other DNA
ctcattctggagggaggaaa

SEQ ID NO: 3148 - RNA, 20 nt, synthetic construct
  source 1..20: mol_type = other RNA
gggccttatgcatctccatc

SEQ ID NO: 3149 - RNA, 20 nt, synthetic construct
  source 1..20: mol_type = other RNA
taatcagcatattatccaga

SEQ ID NO: 3150 - RNA, 20 nt, synthetic construct
  source 1..20: mol_type = other RNA
cccttttgtacgttttttaa

SEQ ID NO: 3151 - RNA, 20 nt, synthetic construct
  source 1..20: mol_type = other RNA
ctgtatcttcttagccagta

SEQ ID NO: 3152 - RNA, 20 nt, synthetic construct
  source 1..20: mol_type = other RNA
gttaacgcgtcatttacatt

SEQ ID NO: 3153 - RNA, 20 nt, synthetic construct
  source 1..20: mol_type = other RNA
tacaataaattagccggatg

SEQ ID NO: 3154 - RNA, 20 nt, synthetic construct
  source 1..20: mol_type = other RNA
aaacttttaggagtcaaagt

SEQ ID NO: 3155 - RNA, 20 nt, synthetic construct
  source 1..20: mol_type = other RNA
aaaacttttaggagtcaaag

SEQ ID NO: 3156 - RNA, 20 nt, synthetic construct
  source 1..20: mol_type = other RNA
aatgttaacagtgttggctt

SEQ ID NO: 3157 - RNA, 20 nt, synthetic construct
  source 1..20: mol_type = other RNA
gtggtggctgcaggtgaggg

SEQ ID NO: 3158 - RNA, 20 nt, synthetic construct
  source 1..20: mol_type = other RNA
tactaaaatgttaacagtgt

SEQ ID NO: 3159 - RNA, 20 nt, synthetic construct
  source 1..20: mol_type = other RNA
aaaaaaggacttgacatgca

SEQ ID NO: 3160 - RNA, 20 nt, synthetic construct
  source 1..20: mol_type = other RNA
gtcccagcttctcttgaggg

SEQ ID NO: 3161 - RNA, 20 nt, synthetic construct
  source 1..20: mol_type = other RNA
gttaacagtgttggctttgg

SEQ ID NO: 3162 - RNA, 20 nt, synthetic construct
  source 1..20: mol_type = other RNA
gttggtggtcactgacagtg

SEQ ID NO: 3163 - RNA, 20 nt, synthetic construct
  source 1..20: mol_type = other RNA
gaaactagtggctaccgtac

SEQ ID NO: 3164 - RNA, 20 nt, synthetic construct
  source 1..20: mol_type = other RNA
aaaaaacgtacaaaaggggc

SEQ ID NO: 3165 - RNA, 20 nt, synthetic construct
  source 1..20: mol_type = other RNA
agccccaggccatcaaccgg

SEQ ID NO: 3166 - RNA, 20 nt, synthetic construct
  source 1..20: mol_type = other RNA
ggcagccagacagatgcttc

SEQ ID NO: 3167 - RNA, 20 nt, synthetic construct
  source 1..20: mol_type = other RNA
ctggagaacaaaagcatttt

SEQ ID NO: 3168 - RNA, 20 nt, synthetic construct
  source 1..20: mol_type = other RNA
atcttagatttatgcaatgt

SEQ ID NO: 3169 - RNA, 20 nt, synthetic construct
  source 1..20: mol_type = other RNA
acaagtagaatcagaattct

SEQ ID NO: 3170 - RNA, 20 nt, synthetic construct
  source 1..20: mol_type = other RNA
aatatcggctcactgcaacc

SEQ ID NO: 3171 - RNA, 20 nt, synthetic construct
  source 1..20: mol_type = other RNA
ccctcaagagaagctgggac

SEQ ID NO: 3172 - RNA, 20 nt, synthetic construct
  source 1..20: mol_type = other RNA
tcttaggagatgacgaggtt

SEQ ID NO: 3173 - RNA, 20 nt, synthetic construct
  source 1..20: mol_type = other RNA
aataataaagaactagagaa

SEQ ID NO: 3174 - RNA, 20 nt, synthetic construct
  source 1..20: mol_type = other RNA
aaaaacgtacaaaaggggcc

SEQ ID NO: 3175 - RNA, 20 nt, synthetic construct
  source 1..20: mol_type = other RNA
ggctgagcaggcggagaagt

SEQ ID NO: 3176 - RNA, 20 nt, synthetic construct
  source 1..20: mol_type = other RNA
agagaaaggagaacagtctg

SEQ ID NO: 3177 - RNA, 20 nt, synthetic construct
  source 1..20: mol_type = other RNA
cttctttctctttcacgaga

SEQ ID NO: 3178 - RNA, 20 nt, synthetic construct
  source 1..20: mol_type = other RNA
aatcttagatttatgcaatg

SEQ ID NO: 3179 - RNA, 20 nt, synthetic construct
  source 1..20: mol_type = other RNA
ctgagcaggcggagaagtag

SEQ ID NO: 3180 - RNA, 20 nt, synthetic construct
  source 1..20: mol_type = other RNA
acctagtgttgacaaggctg

SEQ ID NO: 3181 - RNA, 20 nt, synthetic construct
  source 1..20: mol_type = other RNA
tcccagcttctcttgagggt

SEQ ID NO: 3182 - RNA, 20 nt, synthetic construct
  source 1..20: mol_type = other RNA
aataattctgttgggacgac

SEQ ID NO: 3183 - RNA, 20 nt, synthetic construct
  source 1..20: mol_type = other RNA
cctataaagaggacgtttcc

SEQ ID NO: 3184 - RNA, 20 nt, synthetic construct
  source 1..20: mol_type = other RNA
ccttctttctctttcacgag

SEQ ID NO: 3185 - RNA, 20 nt, synthetic construct
  source 1..20: mol_type = other RNA
cccatcgaagtactcaccat

SEQ ID NO: 3186 - RNA, 20 nt, synthetic construct
  source 1..20: mol_type = other RNA
gtgtcatatgttgctggtgg

SEQ ID NO: 3187 - RNA, 20 nt, synthetic construct
  source 1..20: mol_type = other RNA
aatgtaaatgacgcgttaac

SEQ ID NO: 3188 - RNA, 20 nt, synthetic construct
  source 1..20: mol_type = other RNA
gcctttgagccaagtggatt

SEQ ID NO: 3189 - RNA, 20 nt, synthetic construct
  source 1..20: mol_type = other RNA
gtcagactctgtgctggctg

SEQ ID NO: 3190 - RNA, 20 nt, synthetic construct
  source 1..20: mol_type = other RNA
ccgtcaatagcattccggtt

SEQ ID NO: 3191 - RNA, 20 nt, synthetic construct
  source 1..20: mol_type = other RNA
ccattaaaaaacgtacaaaa

SEQ ID NO: 3192 - RNA, 20 nt, synthetic construct
  source 1..20: mol_type = other RNA
gggatttggggaggatgggg

SEQ ID NO: 3193 - RNA, 20 nt, synthetic construct
  source 1..20: mol_type = other RNA
actgtgtcatatgttgctgg

SEQ ID NO: 3194 - RNA, 20 nt, synthetic construct
  source 1..20: mol_type = other RNA
tacaatgttgtggaccgggc

SEQ ID NO: 3195 - RNA, 20 nt, synthetic construct
  source 1..20: mol_type = other RNA
gatagagtagcaaacaaaac

SEQ ID NO: 3196 - RNA, 20 nt, synthetic construct
  source 1..20: mol_type = other RNA
gctctcaaaggagactgaga

SEQ ID NO: 3197 - RNA, 20 nt, synthetic construct
  source 1..20: mol_type = other RNA
ggaagagcaaggagctcctg

SEQ ID NO: 3198 - RNA, 20 nt, synthetic construct
  source 1..20: mol_type = other RNA
tgtgtcatatgttgctggtg

SEQ ID NO: 3199 - RNA, 20 nt, synthetic construct
  source 1..20: mol_type = other RNA
ctgagaaggtgtacctagag

SEQ ID NO: 3200 - RNA, 20 nt, synthetic construct
  source 1..20: mol_type = other RNA
gtccgggagccagttcctgc

SEQ ID NO: 3201 - RNA, 20 nt, synthetic construct
  source 1..20: mol_type = other RNA
ttaggagatgacgaggttgg

SEQ ID NO: 3202 - RNA, 20 nt, synthetic construct
  source 1..20: mol_type = other RNA
ggaggaagcagagctctcaa

SEQ ID NO: 3203 - RNA, 20 nt, synthetic construct
  source 1..20: mol_type = other RNA
agtcatcagcctgggaaaca

SEQ ID NO: 3204 - RNA, 20 nt, synthetic construct
  source 1..20: mol_type = other RNA
tccgggagccagttcctgca

SEQ ID NO: 3205 - RNA, 20 nt, synthetic construct
  source 1..20: mol_type = other RNA
gagcaaggagctcctgaggc

SEQ ID NO: 3206 - RNA, 20 nt, synthetic construct
  source 1..20: mol_type = other RNA
tctggtacaatgttgtggac

SEQ ID NO: 3207 - RNA, 20 nt, synthetic construct
  source 1..20: mol_type = other RNA
cctgggagtgtctgacaacc

SEQ ID NO: 3208 - RNA, 20 nt, synthetic construct
  source 1..20: mol_type = other RNA
ccagttcctgcagggcctcg

SEQ ID NO: 3209 - RNA, 20 nt, synthetic construct
  source 1..20: mol_type = other RNA
tagggaatgggctgagcagg

SEQ ID NO: 3210 - RNA, 20 nt, synthetic construct
  source 1..20: mol_type = other RNA
agctttctgtccctgtgaga

SEQ ID NO: 3211 - RNA, 20 nt, synthetic construct
  source 1..20: mol_type = other RNA
tcgtctccctgccttctcac

SEQ ID NO: 3212 - RNA, 20 nt, synthetic construct
  source 1..20: mol_type = other RNA
cgaagtactcaccatgggca

SEQ ID NO: 3213 - RNA, 20 nt, synthetic construct
  source 1..20: mol_type = other RNA
aggccactggaccatgccca

SEQ ID NO: 3214 - RNA, 20 nt, synthetic construct
  source 1..20: mol_type = other RNA
ggcagggagacgagtctaat

SEQ ID NO: 3215 - RNA, 20 nt, synthetic construct
  source 1..20: mol_type = other RNA
gggcttagatttatgcaata

SEQ ID NO: 3216 - RNA, 20 nt, synthetic construct
  source 1..20: mol_type = other RNA
ttcagcgaagacaagggatt

SEQ ID NO: 3217 - RNA, 20 nt, synthetic construct
  source 1..20: mol_type = other RNA
catggcccacgaggccctgc

SEQ ID NO: 3218 - RNA, 20 nt, synthetic construct
  source 1..20: mol_type = other RNA
cagttcctgcagggcctcgt

SEQ ID NO: 3219 - RNA, 20 nt, synthetic construct
  source 1..20: mol_type = other RNA
cattaaaaaacgtacaaaag

SEQ ID NO: 3220 - RNA, 20 nt, synthetic construct
  source 1..20: mol_type = other RNA
aggcagggagacgagtctaa

SEQ ID NO: 3221 - RNA, 20 nt, synthetic construct
  source 1..20: mol_type = other RNA
ctaacatctggatgaacctg

SEQ ID NO: 3222 - RNA, 20 nt, synthetic construct
  source 1..20: mol_type = other RNA
ccagtggcctgtcttctcct

SEQ ID NO: 3223 - RNA, 20 nt, synthetic construct
  source 1..20: mol_type = other RNA
tattacaaatactgccgcta

SEQ ID NO: 3224 - RNA, 20 nt, synthetic construct
  source 1..20: mol_type = other RNA
gcagggagacgagtctaatg

SEQ ID NO: 3225 - RNA, 20 nt, synthetic construct
  source 1..20: mol_type = other RNA
caatctgcttgagaaacagg

SEQ ID NO: 3226 - RNA, 20 nt, synthetic construct
  source 1..20: mol_type = other RNA
ggcttagatttatgcaatat

SEQ ID NO: 3227 - RNA, 20 nt, synthetic construct
  source 1..20: mol_type = other RNA
acactcccagggctcactct

SEQ ID NO: 3228 - RNA, 20 nt, synthetic construct
  source 1..20: mol_type = other RNA
tatgggctcattctgcccct

SEQ ID NO: 3229 - RNA, 20 nt, synthetic construct
  source 1..20: mol_type = other RNA
cgaagacaagggatttgggg

SEQ ID NO: 3230 - RNA, 20 nt, synthetic construct
  source 1..20: mol_type = other RNA
agcacagagtctgacattga

SEQ ID NO: 3231 - RNA, 20 nt, synthetic construct
  source 1..20: mol_type = other RNA
gtcttaggagatgacgaggt

SEQ ID NO: 3232 - RNA, 20 nt, synthetic construct
  source 1..20: mol_type = other RNA
gctgagcaggcggagaagta

SEQ ID NO: 3233 - RNA, 20 nt, synthetic construct
  source 1..20: mol_type = other RNA
ttccaatctgcttgagaaac

SEQ ID NO: 3234 - RNA, 20 nt, synthetic construct
  source 1..20: mol_type = other RNA
gagatcataatacatctcag

SEQ ID NO: 3235 - RNA, 20 nt, synthetic construct
  source 1..20: mol_type = other RNA
gcccatcgaagtactcacca

SEQ ID NO: 3236 - RNA, 20 nt, synthetic construct
  source 1..20: mol_type = other RNA
caggcggagaagtaggggtg

SEQ ID NO: 3237 - RNA, 20 nt, synthetic construct
  source 1..20: mol_type = other RNA
ttgaaacccagtcaccaatg

SEQ ID NO: 3238 - RNA, 20 nt, synthetic construct
  source 1..20: mol_type = other RNA
acataatccaactgagagtc

SEQ ID NO: 3239 - RNA, 20 nt, synthetic construct
  source 1..20: mol_type = other RNA
gtgagtgtactgagtctccg

SEQ ID NO: 3240 - RNA, 20 nt, synthetic construct
  source 1..20: mol_type = other RNA
caatggagtcacacagcatg

SEQ ID NO: 3241 - RNA, 20 nt, synthetic construct
  source 1..20: mol_type = other RNA
ggggtggggggacgcatttg

SEQ ID NO: 3242 - RNA, 20 nt, synthetic construct
  source 1..20: mol_type = other RNA
aactgagagtcaggaaacct

SEQ ID NO: 3243 - RNA, 20 nt, synthetic construct
  source 1..20: mol_type = other RNA
tgctcacttccataaggata

SEQ ID NO: 3244 - RNA, 20 nt, synthetic construct
  source 1..20: mol_type = other RNA
atttggggaggatggggagg

SEQ ID NO: 3245 - RNA, 20 nt, synthetic construct
  source 1..20: mol_type = other RNA
cgggctggccacggcaagtg

SEQ ID NO: 3246 - RNA, 20 nt, synthetic construct
  source 1..20: mol_type = other RNA
ctcaatgtcagactctgtgc

SEQ ID NO: 3247 - RNA, 20 nt, synthetic construct
  source 1..20: mol_type = other RNA
tgcagactattaattgcaag

SEQ ID NO: 3248 - RNA, 20 nt, synthetic construct
  source 1..20: mol_type = other RNA
acaggcgtgagccacgggcc

SEQ ID NO: 3249 - RNA, 20 nt, synthetic construct
  source 1..20: mol_type = other RNA
catcaattgtgccaggcccg

SEQ ID NO: 3250 - RNA, 20 nt, synthetic construct
  source 1..20: mol_type = other RNA
cagcacagagtctgacattg

SEQ ID NO: 3251 - RNA, 20 nt, synthetic construct
  source 1..20: mol_type = other RNA
gttgcagactattaattgca

SEQ ID NO: 3252 - RNA, 20 nt, synthetic construct
  source 1..20: mol_type = other RNA
gcaagtgtggcaacagggtc

SEQ ID NO: 3253 - RNA, 20 nt, synthetic construct
  source 1..20: mol_type = other RNA
tagggtcttggagttttgat

SEQ ID NO: 3254 - RNA, 20 nt, synthetic construct
  source 1..20: mol_type = other RNA
aaagcctcacatggcccacg

SEQ ID NO: 3255 - RNA, 20 nt, synthetic construct
  source 1..20: mol_type = other RNA
cctcgaggtgagcgtgtgct

SEQ ID NO: 3256 - RNA, 20 nt, synthetic construct
  source 1..20: mol_type = other RNA
gcaggcggagaagtaggggt

SEQ ID NO: 3257 - RNA, 20 nt, synthetic construct
  source 1..20: mol_type = other RNA
catttttgtggacagttgtg

SEQ ID NO: 3258 - RNA, 20 nt, synthetic construct
  source 1..20: mol_type = other RNA
ttgcagactattaattgcaa

SEQ ID NO: 3259 - RNA, 20 nt, synthetic construct
  source 1..20: mol_type = other RNA
ctggttgtcagacactccca

SEQ ID NO: 3260 - RNA, 20 nt, synthetic construct
  source 1..20: mol_type = other RNA
cagcgaagacaagggatttg

SEQ ID NO: 3261 - RNA, 20 nt, synthetic construct
  source 1..20: mol_type = other RNA
tcagcgaagacaagggattt

SEQ ID NO: 3262 - RNA, 20 nt, synthetic construct
  source 1..20: mol_type = other RNA
tggatttgaaaataagaagt

SEQ ID NO: 3263 - RNA, 20 nt, synthetic construct
  source 1..20: mol_type = other RNA
aggtttaaaaatattgggtg

SEQ ID NO: 3264 - RNA, 20 nt, synthetic construct
  source 1..20: mol_type = other RNA
ttggcccagggtggtggcag

SEQ ID NO: 3265 - RNA, 20 nt, synthetic construct
  source 1..20: mol_type = other RNA
acagaaaaagctgtcaccaa

SEQ ID NO: 3266 - RNA, 20 nt, synthetic construct
  source 1..20: mol_type = other RNA
acaagggatttggggaggat

SEQ ID NO: 3267 - RNA, 20 nt, synthetic construct
  source 1..20: mol_type = other RNA
ggcagccccaggccatcaac

SEQ ID NO: 3268 - RNA, 20 nt, synthetic construct
  source 1..20: mol_type = other RNA
caggttcccagctgtacaat

SEQ ID NO: 3269 - RNA, 20 nt, synthetic construct
  source 1..20: mol_type = other RNA
aggcggagaagtaggggtgg

SEQ ID NO: 3270 - RNA, 20 nt, synthetic construct
  source 1..20: mol_type = other RNA
agtgtggtggctgcaggtga

SEQ ID NO: 3271 - RNA, 20 nt, synthetic construct
  source 1..20: mol_type = other RNA
agcacattgggcagacacaa

SEQ ID NO: 3272 - RNA, 20 nt, synthetic construct
  source 1..20: mol_type = other RNA
ccacgaggccctgcaggaac

SEQ ID NO: 3273 - RNA, 20 nt, synthetic construct
  source 1..20: mol_type = other RNA
cgtctccctgccttctcaca

SEQ ID NO: 3274 - RNA, 20 nt, synthetic construct
  source 1..20: mol_type = other RNA
agatactaatcccatgtatg

SEQ ID NO: 3275 - RNA, 20 nt, synthetic construct
  source 1..20: mol_type = other RNA
ttaggctttgccctcataca

SEQ ID NO: 3276 - RNA, 20 nt, synthetic construct
  source 1..20: mol_type = other RNA
ctactcgggggaggctgaag

SEQ ID NO: 3277 - RNA, 20 nt, synthetic construct
  source 1..20: mol_type = other RNA
acctcactgcctcagcagcg

SEQ ID NO: 3278 - RNA, 20 nt, synthetic construct
  source 1..20: mol_type = other RNA
ttgaggacccaggagaagac

SEQ ID NO: 3279 - RNA, 20 nt, synthetic construct
  source 1..20: mol_type = other RNA
cttaggagatgacgaggttg

SEQ ID NO: 3280 - RNA, 20 nt, synthetic construct
  source 1..20: mol_type = other RNA
ggcggagaagtaggggtggg

SEQ ID NO: 3281 - RNA, 20 nt, synthetic construct
  source 1..20: mol_type = other RNA
ctggtacaatgttgtggacc

SEQ ID NO: 3282 - RNA, 20 nt, synthetic construct
  source 1..20: mol_type = other RNA
ggcaaagcattctgggcaga

SEQ ID NO: 3283 - RNA, 20 nt, synthetic construct
  source 1..20: mol_type = other RNA
gaaaattacggtgactgctg

SEQ ID NO: 3284 - RNA, 20 nt, synthetic construct
  source 1..20: mol_type = other RNA
ggaccaacctagtgttgaca

SEQ ID NO: 3285 - RNA, 20 nt, synthetic construct
  source 1..20: mol_type = other RNA
gcttttgttctccagtttgt

SEQ ID NO: 3286 - RNA, 20 nt, synthetic construct
  source 1..20: mol_type = other RNA
tgatttaatcaccaacaaac

SEQ ID NO: 3287 - RNA, 20 nt, synthetic construct
  source 1..20: mol_type = other RNA
atttagcaatgtttactggg

SEQ ID NO: 3288 - RNA, 20 nt, synthetic construct
  source 1..20: mol_type = other RNA
ggcattgaatccaatatgtg

SEQ ID NO: 3289 - RNA, 20 nt, synthetic construct
  source 1..20: mol_type = other RNA
gtgttaccatcagagattgc

SEQ ID NO: 3290 - RNA, 20 nt, synthetic construct
  source 1..20: mol_type = other RNA
gtaggccattcagtgcttac

SEQ ID NO: 3291 - RNA, 20 nt, synthetic construct
  source 1..20: mol_type = other RNA
tttgaaaataagaagttggc

SEQ ID NO: 3292 - RNA, 20 nt, synthetic construct
  source 1..20: mol_type = other RNA
cacctcgttccgccggttga

SEQ ID NO: 3293 - RNA, 20 nt, synthetic construct
  source 1..20: mol_type = other RNA
acacgctcacctcgagggct

SEQ ID NO: 3294 - RNA, 20 nt, synthetic construct
  source 1..20: mol_type = other RNA
gatatccagtaagcactgaa

SEQ ID NO: 3295 - RNA, 20 nt, synthetic construct
  source 1..20: mol_type = other RNA
tggatttagcaatgtttact

SEQ ID NO: 3296 - RNA, 20 nt, synthetic construct
  source 1..20: mol_type = other RNA
taaagaggacgtttcctggc

SEQ ID NO: 3297 - RNA, 20 nt, synthetic construct
  source 1..20: mol_type = other RNA
ttaatctgtcttttgtcgta

SEQ ID NO: 3298 - RNA, 20 nt, synthetic construct
  source 1..20: mol_type = other RNA
ataggaaatgccttactgtg

SEQ ID NO: 3299 - RNA, 20 nt, synthetic construct
  source 1..20: mol_type = other RNA
cttactggatatctgaacct

SEQ ID NO: 3300 - RNA, 20 nt, synthetic construct
  source 1..20: mol_type = other RNA
agtaaacattgctaaatcca

SEQ ID NO: 3301 - RNA, 20 nt, synthetic construct
  source 1..20: mol_type = other RNA
gggttcttgccttggggtat

SEQ ID NO: 3302 - RNA, 20 nt, synthetic construct
  source 1..20: mol_type = other RNA
gtgaggctttgtggaacttg

SEQ ID NO: 3303 - RNA, 20 nt, synthetic construct
  source 1..20: mol_type = other RNA
acatcttactactaccacat

SEQ ID NO: 3304 - RNA, 20 nt, synthetic construct
  source 1..20: mol_type = other RNA
ccaccaacaccccttgcctt

SEQ ID NO: 3305 - RNA, 20 nt, synthetic construct
  source 1..20: mol_type = other RNA
tttttgggagaccaaaggca

SEQ ID NO: 3306 - RNA, 20 nt, synthetic construct
  source 1..20: mol_type = other RNA
tttcatcctccacgctgctg

SEQ ID NO: 3307 - RNA, 20 nt, synthetic construct
  source 1..20: mol_type = other RNA
tcagagccacatgaaactag

SEQ ID NO: 3308 - RNA, 20 nt, synthetic construct
  source 1..20: mol_type = other RNA
tccattaaaaaacgtacaaa

SEQ ID NO: 3309 - RNA, 20 nt, synthetic construct
  source 1..20: mol_type = other RNA
aaaaaaaggacttgacatgc

SEQ ID NO: 3310 - RNA, 20 nt, synthetic construct
  source 1..20: mol_type = other RNA
gctcctgaggctggagctag

SEQ ID NO: 3311 - RNA, 20 nt, synthetic construct
  source 1..20: mol_type = other RNA
agaaggtgtacctagagtgg

SEQ ID NO: 3312 - RNA, 20 nt, synthetic construct
  source 1..20: mol_type = other RNA
ggtgccagcagatttgggtc

SEQ ID NO: 3313 - RNA, 20 nt, synthetic construct
  source 1..20: mol_type = other RNA
gatactaatcccatgtatga

SEQ ID NO: 3314 - RNA, 20 nt, synthetic construct
  source 1..20: mol_type = other RNA
gaaatccgagagtgagccct

SEQ ID NO: 3315 - RNA, 20 nt, synthetic construct
  source 1..20: mol_type = other RNA
aaaacccctgcaatctctga

SEQ ID NO: 3316 - RNA, 20 nt, synthetic construct
  source 1..20: mol_type = other RNA
taataatatttatattattc

SEQ ID NO: 3317 - RNA, 20 nt, synthetic construct
  source 1..20: mol_type = other RNA
agaaaagaaatgcaagaaat

SEQ ID NO: 3318 - RNA, 20 nt, synthetic construct
  source 1..20: mol_type = other RNA
tgaactgtgtcatatgttgc

SEQ ID NO: 3319 - RNA, 20 nt, synthetic construct
  source 1..20: mol_type = other RNA
cagaaagctttctgtatctc

SEQ ID NO: 3320 - RNA, 20 nt, synthetic construct
  source 1..20: mol_type = other RNA
agaagctgggactggctgtg

SEQ ID NO: 3321 - RNA, 20 nt, synthetic construct
  source 1..20: mol_type = other RNA
cttctcttgagggtggggat

SEQ ID NO: 3322 - RNA, 20 nt, synthetic construct
  source 1..20: mol_type = other RNA
gcccagaatgctttgcccac

SEQ ID NO: 3323 - RNA, 20 nt, synthetic construct
  source 1..20: mol_type = other RNA
agcaggcggagaagtagggg

SEQ ID NO: 3324 - RNA, 20 nt, synthetic construct
  source 1..20: mol_type = other RNA
tctcctctagctccagcctc

SEQ ID NO: 3325 - RNA, 20 nt, synthetic construct
  source 1..20: mol_type = other RNA
ggttaaatgaaagggaaagc

SEQ ID NO: 3326 - RNA, 20 nt, synthetic construct
  source 1..20: mol_type = other RNA
ctaaagcgcgcctttcctca

SEQ ID NO: 3327 - RNA, 20 nt, synthetic construct
  source 1..20: mol_type = other RNA
agaagatgctggcttggccc

SEQ ID NO: 3328 - RNA, 20 nt, synthetic construct
  source 1..20: mol_type = other RNA
caggagctccttgctcttcc

SEQ ID NO: 3329 - RNA, 20 nt, synthetic construct
  source 1..20: mol_type = other RNA
ctgtgtcatatgttgctggt

SEQ ID NO: 3330 - RNA, 20 nt, synthetic construct
  source 1..20: mol_type = other RNA
tagcacattgggcagacaca

SEQ ID NO: 3331 - RNA, 20 nt, synthetic construct
  source 1..20: mol_type = other RNA
gaagcatatcacttctgcta

SEQ ID NO: 3332 - RNA, 20 nt, synthetic construct
  source 1..20: mol_type = other RNA
gttgtggaccgggctggcca

SEQ ID NO: 3333 - RNA, 20 nt, synthetic construct
  source 1..20: mol_type = other RNA
tccagtggcctgtcttctcc

SEQ ID NO: 3334 - RNA, 20 nt, synthetic construct
  source 1..20: mol_type = other RNA
aatttcctgctgtgacaaca

SEQ ID NO: 3335 - RNA, 20 nt, synthetic construct
  source 1..20: mol_type = other RNA
caagggatttggggaggatg

SEQ ID NO: 3336 - RNA, 20 nt, synthetic construct
  source 1..20: mol_type = other RNA
aggaagtagggaacagggac

SEQ ID NO: 3337 - RNA, 20 nt, synthetic construct
  source 1..20: mol_type = other RNA
acctccatctctataaaaat

SEQ ID NO: 3338 - RNA, 20 nt, synthetic construct
  source 1..20: mol_type = other RNA
ttacttctctttggctatga

SEQ ID NO: 3339 - RNA, 20 nt, synthetic construct
  source 1..20: mol_type = other RNA
tcccactggcccacgttgca

SEQ ID NO: 3340 - RNA, 20 nt, synthetic construct
  source 1..20: mol_type = other RNA
cagccatgttgcttctcctt

SEQ ID NO: 3341 - RNA, 20 nt, synthetic construct
  source 1..20: mol_type = other RNA
tatttttctccctgtttaga

SEQ ID NO: 3342 - RNA, 20 nt, synthetic construct
  source 1..20: mol_type = other RNA
gggcaaagcattctgggcag

SEQ ID NO: 3343 - RNA, 20 nt, synthetic construct
  source 1..20: mol_type = other RNA
gaaggaggcgagacacctgt

SEQ ID NO: 3344 - RNA, 20 nt, synthetic construct
  source 1..20: mol_type = other RNA
atttcctgctgtgacaacaa

SEQ ID NO: 3345 - RNA, 20 nt, synthetic construct
  source 1..20: mol_type = other RNA
aagaaaagaaatgcaagaaa

SEQ ID NO: 3346 - RNA, 20 nt, synthetic construct
  source 1..20: mol_type = other RNA
gcttctcttgagggtgggga

SEQ ID NO: 3347 - RNA, 20 nt, synthetic construct
  source 1..20: mol_type = other RNA
attaatctgtcttttgtcgt

SEQ ID NO: 3348 - RNA, 20 nt, synthetic construct
  source 1..20: mol_type = other RNA
acaggaggaacgcacgcagc

SEQ ID NO: 3349 - RNA, 20 nt, synthetic construct
  source 1..20: mol_type = other RNA
cctggttgtcagacactccc

SEQ ID NO: 3350 - RNA, 20 nt, synthetic construct
  source 1..20: mol_type = other RNA
aggtcaacatcaattgtgcc

SEQ ID NO: 3351 - RNA, 20 nt, synthetic construct
  source 1..20: mol_type = other RNA
gacaagggatttggggagga

SEQ ID NO: 3352 - RNA, 20 nt, synthetic construct
  source 1..20: mol_type = other RNA
ggcttagatctaaatactcc

SEQ ID NO: 3353 - RNA, 20 nt, synthetic construct
  source 1..20: mol_type = other RNA
gagcacacagcctcacagta

SEQ ID NO: 3354 - RNA, 20 nt, synthetic construct
  source 1..20: mol_type = other RNA
gttaccatcagagattgcag

SEQ ID NO: 3355 - RNA, 20 nt, synthetic construct
  source 1..20: mol_type = other RNA
ttggatttagcaatgtttac

SEQ ID NO: 3356 - RNA, 20 nt, synthetic construct
  source 1..20: mol_type = other RNA
cttggagttttgataggcac

SEQ ID NO: 3357 - RNA, 20 nt, synthetic construct
  source 1..20: mol_type = other RNA
atttaataaaagagaaacct

SEQ ID NO: 3358 - RNA, 20 nt, synthetic construct
  source 1..20: mol_type = other RNA
tttaataaaagagaaacctt

SEQ ID NO: 3359 - RNA, 20 nt, synthetic construct
  source 1..20: mol_type = other RNA
attaaaaagcagggagaagg

SEQ ID NO: 3360 - RNA, 20 nt, synthetic construct
  source 1..20: mol_type = other RNA
gagttccagaagcatctgtc

SEQ ID NO: 3361 - RNA, 20 nt, synthetic construct
  source 1..20: mol_type = other RNA
gaagatgctggcttggccca

SEQ ID NO: 3362 - RNA, 20 nt, synthetic construct
  source 1..20: mol_type = other RNA
gctagaggagagagagtctt

SEQ ID NO: 3363 - RNA, 20 nt, synthetic construct
  source 1..20: mol_type = other RNA
cgaaggaggcgagacacctg

SEQ ID NO: 3364 - RNA, 20 nt, synthetic construct
  source 1..20: mol_type = other RNA
gacaaacagcctttgtcttc

SEQ ID NO: 3365 - RNA, 20 nt, synthetic construct
  source 1..20: mol_type = other RNA
tattggattcaatgccaata

SEQ ID NO: 3366 - RNA, 20 nt, synthetic construct
  source 1..20: mol_type = other RNA
tccccaccctcaagagaagc

SEQ ID NO: 3367 - RNA, 20 nt, synthetic construct
  source 1..20: mol_type = other RNA
tcacagcagagtggcccttt

SEQ ID NO: 3368 - RNA, 20 nt, synthetic construct
  source 1..20: mol_type = other RNA
gattgagagggaattggaac

SEQ ID NO: 3369 - RNA, 20 nt, synthetic construct
  source 1..20: mol_type = other RNA
ttttgggagaccaaaggcaa

SEQ ID NO: 3370 - RNA, 20 nt, synthetic construct
  source 1..20: mol_type = other RNA
cccagcttctcttgagggtg

SEQ ID NO: 3371 - RNA, 20 nt, synthetic construct
  source 1..20: mol_type = other RNA
gactgcactcacctcggaac

SEQ ID NO: 3372 - RNA, 20 nt, synthetic construct
  source 1..20: mol_type = other RNA
ggcaacagggtccggttccg

SEQ ID NO: 3373 - RNA, 20 nt, synthetic construct
  source 1..20: mol_type = other RNA
tgacgaggttgggggtgtcc

SEQ ID NO: 3374 - RNA, 20 nt, synthetic construct
  source 1..20: mol_type = other RNA
taggctttgccctcatacat

SEQ ID NO: 3375 - RNA, 20 nt, synthetic construct
  source 1..20: mol_type = other RNA
tgaagcatatcacttctgct

SEQ ID NO: 3376 - RNA, 20 nt, synthetic construct
  source 1..20: mol_type = other RNA
aatcagaattcttggtttca

SEQ ID NO: 3377 - RNA, 20 nt, synthetic construct
  source 1..20: mol_type = other RNA
gatgttctaaaaatccttat

SEQ ID NO: 3378 - RNA, 20 nt, synthetic construct
  source 1..20: mol_type = other RNA
agacaaatgctttctgcggg

SEQ ID NO: 3379 - RNA, 20 nt, synthetic construct
  source 1..20: mol_type = other RNA
tgttaccatcagagattgca

SEQ ID NO: 3380 - RNA, 20 nt, synthetic construct
  source 1..20: mol_type = other RNA
cccgccaaagcgttttgcgc

SEQ ID NO: 3381 - RNA, 20 nt, synthetic construct
  source 1..20: mol_type = other RNA
cagttgtgtggaaatatgat

SEQ ID NO: 3382 - RNA, 20 nt, synthetic construct
  source 1..20: mol_type = other RNA
acgatgtccacaaagaagac

SEQ ID NO: 3383 - RNA, 20 nt, synthetic construct
  source 1..20: mol_type = other RNA
ttaggcgacaggcatattca

SEQ ID NO: 3384 - RNA, 20 nt, synthetic construct
  source 1..20: mol_type = other RNA
gctggtttaaagcactgatg

SEQ ID NO: 3385 - RNA, 20 nt, synthetic construct
  source 1..20: mol_type = other RNA
ccaggaaacgtcctctttat

SEQ ID NO: 3386 - RNA, 20 nt, synthetic construct
  source 1..20: mol_type = other RNA
tcagcccattccctataaag

SEQ ID NO: 3387 - RNA, 20 nt, synthetic construct
  source 1..20: mol_type = other RNA
agaaagctttctgtatctca

SEQ ID NO: 3388 - RNA, 20 nt, synthetic construct
  source 1..20: mol_type = other RNA
acttattaaataagtatgga

SEQ ID NO: 3389 - RNA, 20 nt, synthetic construct
  source 1..20: mol_type = other RNA
attggattgcacccaggaat

SEQ ID NO: 3390 - RNA, 20 nt, synthetic construct
  source 1..20: mol_type = other RNA
tgctttcagagccaattcct

SEQ ID NO: 3391 - RNA, 20 nt, synthetic construct
  source 1..20: mol_type = other RNA
ttctgccccttggtccaaaa

SEQ ID NO: 3392 - RNA, 20 nt, synthetic construct
  source 1..20: mol_type = other RNA
caaatggtgagctgagggac

SEQ ID NO: 3393 - RNA, 20 nt, synthetic construct
  source 1..20: mol_type = other RNA
cctttagcttccaccactct

SEQ ID NO: 3394 - RNA, 20 nt, synthetic construct
  source 1..20: mol_type = other RNA
aggtcaacctagtttaaata

SEQ ID NO: 3395 - RNA, 20 nt, synthetic construct
  source 1..20: mol_type = other RNA
ttggttgcctgtcttctttg

SEQ ID NO: 3396 - RNA, 20 nt, synthetic construct
  source 1..20: mol_type = other RNA
agaaatccgagagtgagccc

SEQ ID NO: 3397 - RNA, 20 nt, synthetic construct
  source 1..20: mol_type = other RNA
actgcaaccttccgcccgcc

SEQ ID NO: 3398 - RNA, 20 nt, synthetic construct
  source 1..20: mol_type = other RNA
atcgattgaacccaggcggg

SEQ ID NO: 3399 - RNA, 20 nt, synthetic construct
  source 1..20: mol_type = other RNA
taggcgacaggcatattcat

SEQ ID NO: 3400 - RNA, 20 nt, synthetic construct
  source 1..20: mol_type = other RNA
ggcgtgttccaggaagagca

SEQ ID NO: 3401 - RNA, 20 nt, synthetic construct
  source 1..20: mol_type = other RNA
caagcacacgctcacctcga

SEQ ID NO: 3402 - RNA, 20 nt, synthetic construct
  source 1..20: mol_type = other RNA
tttattattatatgcatcat

SEQ ID NO: 3403 - RNA, 20 nt, synthetic construct
  source 1..20: mol_type = other RNA
atctcagggttcttgccttg

SEQ ID NO: 3404 - RNA, 20 nt, synthetic construct
  source 1..20: mol_type = other RNA
cttatttaataagttttaca

SEQ ID NO: 3405 - RNA, 20 nt, synthetic construct
  source 1..20: mol_type = other RNA
ggcaaccaatttctaacatc

SEQ ID NO: 3406 - RNA, 20 nt, synthetic construct
  source 1..20: mol_type = other RNA
agaagcagtggagggtaaat

SEQ ID NO: 3407 - RNA, 20 nt, synthetic construct
  source 1..20: mol_type = other RNA
atcacagaagccatctaaac

SEQ ID NO: 3408 - RNA, 20 nt, synthetic construct
  source 1..20: mol_type = other RNA
gctggcttggcccagggtgg

SEQ ID NO: 3409 - RNA, 20 nt, synthetic construct
  source 1..20: mol_type = other RNA
tttagcaatgtttactgggt

SEQ ID NO: 3410 - RNA, 20 nt, synthetic construct
  source 1..20: mol_type = other RNA
ctgtttgttcagattcgtgt

SEQ ID NO: 3411 - RNA, 20 nt, synthetic construct
  source 1..20: mol_type = other RNA
actgagaaaactgcagaagc

SEQ ID NO: 3412 - RNA, 20 nt, synthetic construct
  source 1..20: mol_type = other RNA
taaattaattaaaattggcc

SEQ ID NO: 3413 - RNA, 20 nt, synthetic construct
  source 1..20: mol_type = other RNA
tctccaggtgccctgcaacg

SEQ ID NO: 3414 - RNA, 20 nt, synthetic construct
  source 1..20: mol_type = other RNA
ttcccactggcccacgttgc

SEQ ID NO: 3415 - RNA, 20 nt, synthetic construct
  source 1..20: mol_type = other RNA
tcgcttagcatatgtggttg

SEQ ID NO: 3416 - RNA, 20 nt, synthetic construct
  source 1..20: mol_type = other RNA
gatgcttctggaactcaagg

SEQ ID NO: 3417 - RNA, 20 nt, synthetic construct
  source 1..20: mol_type = other RNA
cagcatgtgccaagccctcg

SEQ ID NO: 3418 - RNA, 20 nt, synthetic construct
  source 1..20: mol_type = other RNA
tcacaacaacttcggcctcc

SEQ ID NO: 3419 - RNA, 20 nt, synthetic construct
  source 1..20: mol_type = other RNA
atcatcgcagaaggttgcat

SEQ ID NO: 3420 - RNA, 20 nt, synthetic construct
  source 1..20: mol_type = other RNA
ggcctttaacagcacttgaa

SEQ ID NO: 3421 - RNA, 20 nt, synthetic construct
  source 1..20: mol_type = other RNA
cgaggcgggcaaaccacttg

SEQ ID NO: 3422 - RNA, 20 nt, synthetic construct
  source 1..20: mol_type = other RNA
tctgaagggccctgtcagtt

SEQ ID NO: 3423 - RNA, 20 nt, synthetic construct
  source 1..20: mol_type = other RNA
agaaatatctcagcctctaa

SEQ ID NO: 3424 - RNA, 20 nt, synthetic construct
  source 1..20: mol_type = other RNA
gatgctggcttggcccaggg

SEQ ID NO: 3425 - RNA, 20 nt, synthetic construct
  source 1..20: mol_type = other RNA
ccacggcaagtgtggcaaca

SEQ ID NO: 3426 - RNA, 20 nt, synthetic construct
  source 1..20: mol_type = other RNA
ccaagcacacgctcacctcg

SEQ ID NO: 3427 - RNA, 20 nt, synthetic construct
  source 1..20: mol_type = other RNA
catcttcacaccgcaatgtt

SEQ ID NO: 3428 - RNA, 20 nt, synthetic construct
  source 1..20: mol_type = other RNA
ttgtgtggaaatatgattgg

SEQ ID NO: 3429 - RNA, 20 nt, synthetic construct
  source 1..20: mol_type = other RNA
ctgcttagattttcttgctg

SEQ ID NO: 3430 - RNA, 20 nt, synthetic construct
  source 1..20: mol_type = other RNA
ctccaggtgccctgcaacgt

SEQ ID NO: 3431 - RNA, 20 nt, synthetic construct
  source 1..20: mol_type = other RNA
gatgcatcccattgtacagc

SEQ ID NO: 3432 - RNA, 20 nt, synthetic construct
  source 1..20: mol_type = other RNA
gaaggtttcagcgaagacaa

SEQ ID NO: 3433 - RNA, 20 nt, synthetic construct
  source 1..20: mol_type = other RNA
gtagtgcccacaggatctgc

SEQ ID NO: 3434 - RNA, 20 nt, synthetic construct
  source 1..20: mol_type = other RNA
tcaggttcccagctgtacaa

SEQ ID NO: 3435 - RNA, 20 nt, synthetic construct
  source 1..20: mol_type = other RNA
tccaaaattggattgcaccc

SEQ ID NO: 3436 - RNA, 20 nt, synthetic construct
  source 1..20: mol_type = other RNA
ctccctctggtacaatgttg

SEQ ID NO: 3437 - RNA, 20 nt, synthetic construct
  source 1..20: mol_type = other RNA
cacctgtgggcaaagcattc

SEQ ID NO: 3438 - RNA, 20 nt, synthetic construct
  source 1..20: mol_type = other RNA
aggaccatccagggcaaatt

SEQ ID NO: 3439 - RNA, 20 nt, synthetic construct
  source 1..20: mol_type = other RNA
agtaacaaaagtcatcagcc

SEQ ID NO: 3440 - RNA, 20 nt, synthetic construct
  source 1..20: mol_type = other RNA
ctgcaaccttccgcccgcct

SEQ ID NO: 3441 - RNA, 20 nt, synthetic construct
  source 1..20: mol_type = other RNA
acagatgcttctggaactca

SEQ ID NO: 3442 - RNA, 20 nt, synthetic construct
  source 1..20: mol_type = other RNA
gggcgggcggaaggggaaga

SEQ ID NO: 3443 - RNA, 20 nt, synthetic construct
  source 1..20: mol_type = other RNA
ccctgttgccacacttgccg

SEQ ID NO: 3444 - RNA, 20 nt, synthetic construct
  source 1..20: mol_type = other RNA
cgtttcctggccggacgcag

SEQ ID NO: 3445 - RNA, 20 nt, synthetic construct
  source 1..20: mol_type = other RNA
cagccttgtcaacactaggt

SEQ ID NO: 3446 - RNA, 20 nt, synthetic construct
  source 1..20: mol_type = other RNA
ggaccatccagggcaaattg

SEQ ID NO: 3447 - RNA, 20 nt, synthetic construct
  source 1..20: mol_type = other RNA
gtaacaaaagtcatcagcct

SEQ ID NO: 3448 - RNA, 20 nt, synthetic construct
  source 1..20: mol_type = other RNA
atgcatcccattgtacagct

SEQ ID NO: 3449 - RNA, 20 nt, synthetic construct
  source 1..20: mol_type = other RNA
tctcgctgtgttgctcaggg

SEQ ID NO: 3450 - RNA, 20 nt, synthetic construct
  source 1..20: mol_type = other RNA
actggggaagtagtgcccac

SEQ ID NO: 3451 - RNA, 20 nt, synthetic construct
  source 1..20: mol_type = other RNA
gctgaagcagatacaccaca

SEQ ID NO: 3452 - RNA, 20 nt, synthetic construct
  source 1..20: mol_type = other RNA
actgacagcacccaacattg

SEQ ID NO: 3453 - RNA, 20 nt, synthetic construct
  source 1..20: mol_type = other RNA
ccatcttcacaccgcaatgt

SEQ ID NO: 3454 - RNA, 20 nt, synthetic construct
  source 1..20: mol_type = other RNA
tacagtggacacaaaaaaag

SEQ ID NO: 3455 - RNA, 20 nt, synthetic construct
  source 1..20: mol_type = other RNA
gagtctcgctgtgttgctca

SEQ ID NO: 3456 - RNA, 20 nt, synthetic construct
  source 1..20: mol_type = other RNA
attactgaccacagtttcaa

SEQ ID NO: 3457 - RNA, 20 nt, synthetic construct
  source 1..20: mol_type = other RNA
atgtgctagatgatccatag

SEQ ID NO: 3458 - RNA, 20 nt, synthetic construct
  source 1..20: mol_type = other RNA
tatccagatggagatgcata

SEQ ID NO: 3459 - RNA, 20 nt, synthetic construct
  source 1..20: mol_type = other RNA
tctgaggtaccatatcctta

SEQ ID NO: 3460 - RNA, 20 nt, synthetic construct
  source 1..20: mol_type = other RNA
caggaaacgtcctctttata

SEQ ID NO: 3461 - RNA, 20 nt, synthetic construct
  source 1..20: mol_type = other RNA
aattgccttcacttaggcgt

SEQ ID NO: 3462 - RNA, 20 nt, synthetic construct
  source 1..20: mol_type = other RNA
agagggagcctttgaaactg

SEQ ID NO: 3463 - RNA, 20 nt, synthetic construct
  source 1..20: mol_type = other RNA
gcgtgtgcttggcgtgttcc

SEQ ID NO: 3464 - RNA, 20 nt, synthetic construct
  source 1..20: mol_type = other RNA
ttgaaaataagaagttggct

SEQ ID NO: 3465 - RNA, 20 nt, synthetic construct
  source 1..20: mol_type = other RNA
atctgcgggcagattacgcg

SEQ ID NO: 3466 - RNA, 20 nt, synthetic construct
  source 1..20: mol_type = other RNA
gtaagcactgaatggcctac

SEQ ID NO: 3467 - RNA, 20 nt, synthetic construct
  source 1..20: mol_type = other RNA
caggaccatccagggcaaat

SEQ ID NO: 3468 - RNA, 20 nt, synthetic construct
  source 1..20: mol_type = other RNA
attctgccccttggtccaaa

SEQ ID NO: 3469 - RNA, 20 nt, synthetic construct
  source 1..20: mol_type = other RNA
atgcataaggcccatagaca

SEQ ID NO: 3470 - RNA, 20 nt, synthetic construct
  source 1..20: mol_type = other RNA
atgcatctttcccatgtcta

SEQ ID NO: 3471 - RNA, 20 nt, synthetic construct
  source 1..20: mol_type = other RNA
tcctgggtgcaatccaattt

SEQ ID NO: 3472 - RNA, 20 nt, synthetic construct
  source 1..20: mol_type = other RNA
gcctttcctcatgggttgca

SEQ ID NO: 3473 - RNA, 20 nt, synthetic construct
  source 1..20: mol_type = other RNA
agagctgccatttgcggggc

SEQ ID NO: 3474 - RNA, 20 nt, synthetic construct
  source 1..20: mol_type = other RNA
acaccccaatttgccctgga

SEQ ID NO: 3475 - RNA, 20 nt, synthetic construct
  source 1..20: mol_type = other RNA
tttcgctgtgtctgtctacc

SEQ ID NO: 3476 - RNA, 20 nt, synthetic construct
  source 1..20: mol_type = other RNA
ttacaaaaatgatccgggcg

SEQ ID NO: 3477 - RNA, 20 nt, synthetic construct
  source 1..20: mol_type = other RNA
ctgctttcagagccaattcc

SEQ ID NO: 3478 - RNA, 20 nt, synthetic construct
  source 1..20: mol_type = other RNA
ccccaccctcaagagaagct

SEQ ID NO: 3479 - RNA, 20 nt, synthetic construct
  source 1..20: mol_type = other RNA
ggttgcccaggggctggggg

SEQ ID NO: 3480 - RNA, 20 nt, synthetic construct
  source 1..20: mol_type = other RNA
gtccacaacattgtaccaga

SEQ ID NO: 3481 - RNA, 20 nt, synthetic construct
  source 1..20: mol_type = other RNA
acctgtgggcaaagcattct

SEQ ID NO: 3482 - RNA, 20 nt, synthetic construct
  source 1..20: mol_type = other RNA
ttccaagtagctcggatcac

SEQ ID NO: 3483 - RNA, 20 nt, synthetic construct
  source 1..20: mol_type = other RNA
cagtgtggtggctgcaggtg

SEQ ID NO: 3484 - RNA, 20 nt, synthetic construct
  source 1..20: mol_type = other RNA
attttcccacattatgtata

SEQ ID NO: 3485 - RNA, 20 nt, synthetic construct
  source 1..20: mol_type = other RNA
gggatgagctcttaaaagaa

SEQ ID NO: 3486 - RNA, 20 nt, synthetic construct
  source 1..20: mol_type = other RNA
tagaatttaatattccaaac

SEQ ID NO: 3487 - RNA, 20 nt, synthetic construct
  source 1..20: mol_type = other RNA
gaggtttcctgactctcagt

SEQ ID NO: 3488 - RNA, 20 nt, synthetic construct
  source 1..20: mol_type = other RNA
aatctaagcagactctttca

SEQ ID NO: 3489 - RNA, 20 nt, synthetic construct
  source 1..20: mol_type = other RNA
tttgggagaccaaaggcaag

SEQ ID NO: 3490 - RNA, 20 nt, synthetic construct
  source 1..20: mol_type = other RNA
aatgtaccttgcaacccatg

SEQ ID NO: 3491 - RNA, 20 nt, synthetic construct
  source 1..20: mol_type = other RNA
agtgaaatatttcgattatg

SEQ ID NO: 3492 - RNA, 20 nt, synthetic construct
  source 1..20: mol_type = other RNA
cagatgcttctggaactcaa

SEQ ID NO: 3493 - RNA, 20 nt, synthetic construct
  source 1..20: mol_type = other RNA
agtagtgcccacaggatctg

SEQ ID NO: 3494 - RNA, 20 nt, synthetic construct
  source 1..20: mol_type = other RNA
ctcctgggcccttgttccac

SEQ ID NO: 3495 - RNA, 20 nt, synthetic construct
  source 1..20: mol_type = other RNA
taataagttttacatggcac

SEQ ID NO: 3496 - RNA, 20 nt, synthetic construct
  source 1..20: mol_type = other RNA
tctgctcagaatttctcctc

SEQ ID NO: 3497 - RNA, 20 nt, synthetic construct
  source 1..20: mol_type = other RNA
aggagggggcaaggagtaaa

SEQ ID NO: 3498 - RNA, 20 nt, synthetic construct
  source 1..20: mol_type = other RNA
tagagctgccatttgcgggg

SEQ ID NO: 3499 - RNA, 20 nt, synthetic construct
  source 1..20: mol_type = other RNA
acagtttcaaaggctccctc

SEQ ID NO: 3500 - RNA, 20 nt, synthetic construct
  source 1..20: mol_type = other RNA
cggtagccactagtttcatg

SEQ ID NO: 3501 - RNA, 20 nt, synthetic construct
  source 1..20: mol_type = other RNA
ccttacaccccaatttgccc

SEQ ID NO: 3502 - RNA, 20 nt, synthetic construct
  source 1..20: mol_type = other RNA
aagaaatacaataaattagc

SEQ ID NO: 3503 - RNA, 20 nt, synthetic construct
  source 1..20: mol_type = other RNA
ctaaacctgagtgtaaaaaa

SEQ ID NO: 3504 - RNA, 20 nt, synthetic construct
  source 1..20: mol_type = other RNA
ccagtcccagcttctcttga

SEQ ID NO: 3505 - RNA, 20 nt, synthetic construct
  source 1..20: mol_type = other RNA
agaaacggaagtctgaggct

SEQ ID NO: 3506 - RNA, 20 nt, synthetic construct
  source 1..20: mol_type = other RNA
cccaggagaagacaggccac

SEQ ID NO: 3507 - RNA, 20 nt, synthetic construct
  source 1..20: mol_type = other RNA
aagtcgatccgtggttgccc

SEQ ID NO: 3508 - RNA, 20 nt, synthetic construct
  source 1..20: mol_type = other RNA
aagaaacggaagtctgaggc

SEQ ID NO: 3509 - RNA, 20 nt, synthetic construct
  source 1..20: mol_type = other RNA
gccacggcaagtgtggcaac

SEQ ID NO: 3510 - RNA, 20 nt, synthetic construct
  source 1..20: mol_type = other RNA
atgacgaggttgggggtgtc

SEQ ID NO: 3511 - RNA, 20 nt, synthetic construct
  source 1..20: mol_type = other RNA
aaagcctaatcacctcccaa

SEQ ID NO: 3512 - RNA, 20 nt, synthetic construct
  source 1..20: mol_type = other RNA
ggtctcccaaaaagaggatc

SEQ ID NO: 3513 - RNA, 20 nt, synthetic construct
  source 1..20: mol_type = other RNA
taggtttgatggcctgcttc

SEQ ID NO: 3514 - RNA, 20 nt, synthetic construct
  source 1..20: mol_type = other RNA
cttggcgctatactaggact

SEQ ID NO: 3515 - RNA, 20 nt, synthetic construct
  source 1..20: mol_type = other RNA
ggaaacgctaccatcaaata

SEQ ID NO: 3516 - RNA, 20 nt, synthetic construct
  source 1..20: mol_type = other RNA
cctactgtgtgccctaccct

SEQ ID NO: 3517 - RNA, 20 nt, synthetic construct
  source 1..20: mol_type = other RNA
catccctctggcccagggta

SEQ ID NO: 3518 - RNA, 20 nt, synthetic construct
  source 1..20: mol_type = other RNA
tggagcatccctctggccca

SEQ ID NO: 3519 - RNA, 20 nt, synthetic construct
  source 1..20: mol_type = other RNA
tgtagatgctctgcttttga

SEQ ID NO: 3520 - RNA, 20 nt, synthetic construct
  source 1..20: mol_type = other RNA
gtagtcccagctaccatggg

SEQ ID NO: 3521 - RNA, 20 nt, synthetic construct
  source 1..20: mol_type = other RNA
gcttggcgctatactaggac

SEQ ID NO: 3522 - RNA, 20 nt, synthetic construct
  source 1..20: mol_type = other RNA
aaaaaaacaagtctgggaaa

SEQ ID NO: 3523 - RNA, 20 nt, synthetic construct
  source 1..20: mol_type = other RNA
tgccccctccctcctgaagc

SEQ ID NO: 3524 - RNA, 20 nt, synthetic construct
  source 1..20: mol_type = other RNA
ctaaaattacaaaaatgatc

SEQ ID NO: 3525 - RNA, 20 nt, synthetic construct
  source 1..20: mol_type = other RNA
tctctctgctcacttccata

SEQ ID NO: 3526 - RNA, 20 nt, synthetic construct
  source 1..20: mol_type = other RNA
tcctctttttgggagaccaa

SEQ ID NO: 3527 - RNA, 20 nt, synthetic construct
  source 1..20: mol_type = other RNA
tcacagaagccatctaaaca

SEQ ID NO: 3528 - RNA, 20 nt, synthetic construct
  source 1..20: mol_type = other RNA
aatgtttactgggtgggtgg

SEQ ID NO: 3529 - RNA, 20 nt, synthetic construct
  source 1..20: mol_type = other RNA
gcgcacatgtctcttagcct

SEQ ID NO: 3530 - RNA, 20 nt, synthetic construct
  source 1..20: mol_type = other RNA
tgctggtttaaagcactgat

SEQ ID NO: 3531 - RNA, 20 nt, synthetic construct
  source 1..20: mol_type = other RNA
gcctttggtctcccaaaaag

SEQ ID NO: 3532 - RNA, 20 nt, synthetic construct
  source 1..20: mol_type = other RNA
cagtgccagatcctcttttt

SEQ ID NO: 3533 - RNA, 20 nt, synthetic construct
  source 1..20: mol_type = other RNA
cgggcagattacgcgtggca

SEQ ID NO: 3534 - RNA, 20 nt, synthetic construct
  source 1..20: mol_type = other RNA
gagagtcttaggagatgacg

SEQ ID NO: 3535 - RNA, 20 nt, synthetic construct
  source 1..20: mol_type = other RNA
aaggggcaagctagtgatac

SEQ ID NO: 3536 - RNA, 20 nt, synthetic construct
  source 1..20: mol_type = other RNA
gtggagtttggccaggctgt

SEQ ID NO: 3537 - RNA, 20 nt, synthetic construct
  source 1..20: mol_type = other RNA
cccactcttctccgacagcc

SEQ ID NO: 3538 - RNA, 20 nt, synthetic construct
  source 1..20: mol_type = other RNA
atatggcacctggacacaca

SEQ ID NO: 3539 - RNA, 20 nt, synthetic construct
  source 1..20: mol_type = other RNA
gcatttgtctgtagacagcc

SEQ ID NO: 3540 - RNA, 20 nt, synthetic construct
  source 1..20: mol_type = other RNA
gttgcccaggggctggggga

SEQ ID NO: 3541 - RNA, 20 nt, synthetic construct
  source 1..20: mol_type = other RNA
agatgcttctggaactcaag

SEQ ID NO: 3542 - RNA, 20 nt, synthetic construct
  source 1..20: mol_type = other RNA
gctggattctgactacactg

SEQ ID NO: 3543 - RNA, 20 nt, synthetic construct
  source 1..20: mol_type = other RNA
aaaaaaaaagtcattgttct

SEQ ID NO: 3544 - RNA, 20 nt, synthetic construct
  source 1..20: mol_type = other RNA
aggcctgggggtggagcccg

SEQ ID NO: 3545 - RNA, 20 nt, synthetic construct
  source 1..20: mol_type = other RNA
attaatgtagcaaagtggac

SEQ ID NO: 3546 - RNA, 20 nt, synthetic construct
  source 1..20: mol_type = other RNA
gccctgcaacgtgggccagt

SEQ ID NO: 3547 - RNA, 20 nt, synthetic construct
  source 1..20: mol_type = other RNA
ttctcttacaccgcacatat

SEQ ID NO: 3548 - RNA, 20 nt, synthetic construct
  source 1..20: mol_type = other RNA
aaaaataggtttaaaaatat

SEQ ID NO: 3549 - RNA, 20 nt, synthetic construct
  source 1..20: mol_type = other RNA
cacaacaacttcggcctcct

SEQ ID NO: 3550 - RNA, 20 nt, synthetic construct
  source 1..20: mol_type = other RNA
gcaaggttttattgagtgga

SEQ ID NO: 3551 - RNA, 20 nt, synthetic construct
  source 1..20: mol_type = other RNA
tatctcagggttcttgcctt

SEQ ID NO: 3552 - RNA, 20 nt, synthetic construct
  source 1..20: mol_type = other RNA
atgtctgggaaggccgggtg

SEQ ID NO: 3553 - RNA, 20 nt, synthetic construct
  source 1..20: mol_type = other RNA
tgcatctttcccatgtctat

SEQ ID NO: 3554 - RNA, 20 nt, synthetic construct
  source 1..20: mol_type = other RNA
tgtgaaagtgttactatttt

SEQ ID NO: 3555 - RNA, 20 nt, synthetic construct
  source 1..20: mol_type = other RNA
aagaaagagaatagatagta

SEQ ID NO: 3556 - RNA, 20 nt, synthetic construct
  source 1..20: mol_type = other RNA
ctagcctatgagctttatga

SEQ ID NO: 3557 - RNA, 20 nt, synthetic construct
  source 1..20: mol_type = other RNA
tccacgctgctgaggcagtg

SEQ ID NO: 3558 - RNA, 20 nt, synthetic construct
  source 1..20: mol_type = other RNA
tttctatggccagcttcagg

SEQ ID NO: 3559 - RNA, 20 nt, synthetic construct
  source 1..20: mol_type = other RNA
gggaaggaacgctctatggt

SEQ ID NO: 3560 - RNA, 20 nt, synthetic construct
  source 1..20: mol_type = other RNA
gggcagattacgcgtggcag

SEQ ID NO: 3561 - RNA, 20 nt, synthetic construct
  source 1..20: mol_type = other RNA
cttgccatcataaagctcat

SEQ ID NO: 3562 - RNA, 20 nt, synthetic construct
  source 1..20: mol_type = other RNA
gagttttgataggcacagga

SEQ ID NO: 3563 - RNA, 20 nt, synthetic construct
  source 1..20: mol_type = other RNA
gcaagaaatgggtccaaaat

SEQ ID NO: 3564 - RNA, 20 nt, synthetic construct
  source 1..20: mol_type = other RNA
ggatgggacagagcatctcc

SEQ ID NO: 3565 - RNA, 20 nt, synthetic construct
  source 1..20: mol_type = other RNA
gttccgccggttgatggcct

SEQ ID NO: 3566 - RNA, 20 nt, synthetic construct
  source 1..20: mol_type = other RNA
tttttacactcaggtttagt

SEQ ID NO: 3567 - RNA, 20 nt, synthetic construct
  source 1..20: mol_type = other RNA
tgccctgcaacgtgggccag

SEQ ID NO: 3568 - RNA, 20 nt, synthetic construct
  source 1..20: mol_type = other RNA
tgggccagtgggaaggtttg

SEQ ID NO: 3569 - RNA, 20 nt, synthetic construct
  source 1..20: mol_type = other RNA
gacaaatgctttctgcggga

SEQ ID NO: 3570 - RNA, 20 nt, synthetic construct
  source 1..20: mol_type = other RNA
cagattacgcgtggcagggg

SEQ ID NO: 3571 - RNA, 20 nt, synthetic construct
  source 1..20: mol_type = other RNA
gccctgcaggaactggctcc

SEQ ID NO: 3572 - RNA, 20 nt, synthetic construct
  source 1..20: mol_type = other RNA
tctttagcaggtagagtacc

SEQ ID NO: 3573 - RNA, 20 nt, synthetic construct
  source 1..20: mol_type = other RNA
cacctaccaagcccgactcc

SEQ ID NO: 3574 - RNA, 20 nt, synthetic construct
  source 1..20: mol_type = other RNA
ctcctggagtcgggcttggt

SEQ ID NO: 3575 - RNA, 20 nt, synthetic construct
  source 1..20: mol_type = other RNA
gatgcttttctcctggagtc

SEQ ID NO: 3576 - RNA, 20 nt, synthetic construct
  source 1..20: mol_type = other RNA
actgaccttcctaggtttga

SEQ ID NO: 3577 - RNA, 20 nt, synthetic construct
  source 1..20: mol_type = other RNA
gcaggccatcaaacctagga

SEQ ID NO: 3578 - RNA, 20 nt, synthetic construct
  source 1..20: mol_type = other RNA
ctcatccctgactatctgct

SEQ ID NO: 3579 - RNA, 20 nt, synthetic construct
  source 1..20: mol_type = other RNA
gtgggccagtgggaaggttt

SEQ ID NO: 3580 - RNA, 20 nt, synthetic construct
  source 1..20: mol_type = other RNA
agaatcgattgaacccaggc

SEQ ID NO: 3581 - RNA, 20 nt, synthetic construct
  source 1..20: mol_type = other RNA
acgtcctctttatagggaat

SEQ ID NO: 3582 - RNA, 20 nt, synthetic construct
  source 1..20: mol_type = other RNA
ctatttggcaatttatacaa

SEQ ID NO: 3583 - RNA, 20 nt, synthetic construct
  source 1..20: mol_type = other RNA
caaaaatcagctgggctttg

SEQ ID NO: 3584 - RNA, 20 nt, synthetic construct
  source 1..20: mol_type = other RNA
ggctgtgaggcagtttctga

SEQ ID NO: 3585 - RNA, 20 nt, synthetic construct
  source 1..20: mol_type = other RNA
cgtacaaaaggggccgggcg

SEQ ID NO: 3586 - RNA, 20 nt, synthetic construct
  source 1..20: mol_type = other RNA
cttcttattttcaaatccaa

SEQ ID NO: 3587 - RNA, 20 nt, synthetic construct
  source 1..20: mol_type = other RNA
cgttccgccggttgatggcc

SEQ ID NO: 3588 - RNA, 20 nt, synthetic construct
  source 1..20: mol_type = other RNA
actactaccacattggtgac

SEQ ID NO: 3589 - RNA, 20 nt, synthetic construct
  source 1..20: mol_type = other RNA
cacaaggggcttgaggaccc

SEQ ID NO: 3590 - RNA, 20 nt, synthetic construct
  source 1..20: mol_type = other RNA
ttatagggaatgggctgagc

SEQ ID NO: 3591 - RNA, 20 nt, synthetic construct
  source 1..20: mol_type = other RNA
ctttagcaggtagagtacct

SEQ ID NO: 3592 - RNA, 20 nt, synthetic construct
  source 1..20: mol_type = other RNA
cctagacactgccgtgggtt

SEQ ID NO: 3593 - RNA, 20 nt, synthetic construct
  source 1..20: mol_type = other RNA
gctgtggggctccaaaccca

SEQ ID NO: 3594 - RNA, 20 nt, synthetic construct
  source 1..20: mol_type = other RNA
catagcgggtgagtaaccag

SEQ ID NO: 3595 - RNA, 20 nt, synthetic construct
  source 1..20: mol_type = other RNA
ctcttagcctaggaagattc

SEQ ID NO: 3596 - RNA, 20 nt, synthetic construct
  source 1..20: mol_type = other RNA
taaagaaattgccttcactt

SEQ ID NO: 3597 - RNA, 20 nt, synthetic construct
  source 1..20: mol_type = other RNA
ttcatccaacgcctaagtga

SEQ ID NO: 3598 - RNA, 20 nt, synthetic construct
  source 1..20: mol_type = other RNA
tggctggattctgactacac

SEQ ID NO: 3599 - RNA, 20 nt, synthetic construct
  source 1..20: mol_type = other RNA
ctactaccacattggtgact

SEQ ID NO: 3600 - RNA, 20 nt, synthetic construct
  source 1..20: mol_type = other RNA
tacttcgatgggctatgcag

SEQ ID NO: 3601 - RNA, 20 nt, synthetic construct
  source 1..20: mol_type = other RNA
tgtccaggtgccatatttga

SEQ ID NO: 3602 - RNA, 20 nt, synthetic construct
  source 1..20: mol_type = other RNA
tgcataaggcccatagacat

SEQ ID NO: 3603 - RNA, 20 nt, synthetic construct
  source 1..20: mol_type = other RNA
gcccaggggctgggggaggg

SEQ ID NO: 3604 - RNA, 20 nt, synthetic construct
  source 1..20: mol_type = other RNA
accttgcaacccatgaggaa

SEQ ID NO: 3605 - RNA, 20 nt, synthetic construct
  source 1..20: mol_type = other RNA
attacgcgtggcaggggtgg

SEQ ID NO: 3606 - RNA, 20 nt, synthetic construct
  source 1..20: mol_type = other RNA
tgtgtgtgttgggtgggagt

SEQ ID NO: 3607 - RNA, 20 nt, synthetic construct
  source 1..20: mol_type = other RNA
atcataatacatctcagagg

SEQ ID NO: 3608 - RNA, 20 nt, synthetic construct
  source 1..20: mol_type = other RNA
ctaccatcctatggccacca

SEQ ID NO: 3609 - RNA, 20 nt, synthetic construct
  source 1..20: mol_type = other RNA
aacctctttggaaaactatt

SEQ ID NO: 3610 - RNA, 20 nt, synthetic construct
  source 1..20: mol_type = other RNA
ccccttgtgagcagagagtg

SEQ ID NO: 3611 - RNA, 20 nt, synthetic construct
  source 1..20: mol_type = other RNA
catgaaccttgagataagtg

SEQ ID NO: 3612 - RNA, 20 nt, synthetic construct
  source 1..20: mol_type = other RNA
cagaaaaacttcacactgct

SEQ ID NO: 3613 - RNA, 20 nt, synthetic construct
  source 1..20: mol_type = other RNA
ggcccatttcaggagagaaa

SEQ ID NO: 3614 - RNA, 20 nt, synthetic construct
  source 1..20: mol_type = other RNA
ttaaagcactgatggggtgc

SEQ ID NO: 3615 - RNA, 20 nt, synthetic construct
  source 1..20: mol_type = other RNA
gcatattctggaaaactttt

SEQ ID NO: 3616 - RNA, 20 nt, synthetic construct
  source 1..20: mol_type = other RNA
ctggagcatccctctggccc

SEQ ID NO: 3617 - RNA, 20 nt, synthetic construct
  source 1..20: mol_type = other RNA
ctcccccctcccccagcccc

SEQ ID NO: 3618 - RNA, 20 nt, synthetic construct
  source 1..20: mol_type = other RNA
tcccccctcccccagcccct

SEQ ID NO: 3619 - RNA, 20 nt, synthetic construct
  source 1..20: mol_type = other RNA
tccgtggttgcccaggggct

SEQ ID NO: 3620 - RNA, 20 nt, synthetic construct
  source 1..20: mol_type = other RNA
atccgtggttgcccaggggc

SEQ ID NO: 3621 - RNA, 20 nt, synthetic construct
  source 1..20: mol_type = other RNA
cgacaaaagacagattaatg

SEQ ID NO: 3622 - RNA, 20 nt, synthetic construct
  source 1..20: mol_type = other RNA
aagattagactgaccttcct

SEQ ID NO: 3623 - RNA, 20 nt, synthetic construct
  source 1..20: mol_type = other RNA
cttgctgaggaaagaggagg

SEQ ID NO: 3624 - RNA, 20 nt, synthetic construct
  source 1..20: mol_type = other RNA
gcagagagagaaggaacgac

SEQ ID NO: 3625 - RNA, 20 nt, synthetic construct
  source 1..20: mol_type = other RNA
ctctgctcacaaggggcttg

SEQ ID NO: 3626 - RNA, 20 nt, synthetic construct
  source 1..20: mol_type = other RNA
gacaaaagacagattaatga

SEQ ID NO: 3627 - RNA, 20 nt, synthetic construct
  source 1..20: mol_type = other RNA
aagtatgcaatgaatgtcaa

SEQ ID NO: 3628 - RNA, 20 nt, synthetic construct
  source 1..20: mol_type = other RNA
ccccagcccctgggcaacca

SEQ ID NO: 3629 - RNA, 20 nt, synthetic construct
  source 1..20: mol_type = other RNA
gtgttactattttaggcgac

SEQ ID NO: 3630 - RNA, 20 nt, synthetic construct
  source 1..20: mol_type = other RNA
aaagcagagcatctacatcg

SEQ ID NO: 3631 - RNA, 20 nt, synthetic construct
  source 1..20: mol_type = other RNA
gggtcttactcttgtcgccc

SEQ ID NO: 3632 - RNA, 20 nt, synthetic construct
  source 1..20: mol_type = other RNA
taaaacttattaaataagta

SEQ ID NO: 3633 - RNA, 20 nt, synthetic construct
  source 1..20: mol_type = other RNA
atctgtgggcaagaaaaagg

SEQ ID NO: 3634 - RNA, 20 nt, synthetic construct
  source 1..20: mol_type = other RNA
gagtacctgggagagagggt

SEQ ID NO: 3635 - RNA, 20 nt, synthetic construct
  source 1..20: mol_type = other RNA
cctcactctctgctcacaag

SEQ ID NO: 3636 - RNA, 20 nt, synthetic construct
  source 1..20: mol_type = other RNA
agctgggaacctgaagacaa

SEQ ID NO: 3637 - RNA, 20 nt, synthetic construct
  source 1..20: mol_type = other RNA
gcgggcagattacgcgtggc

SEQ ID NO: 3638 - RNA, 20 nt, synthetic construct
  source 1..20: mol_type = other RNA
aacacaaggaagtagggaac

SEQ ID NO: 3639 - RNA, 20 nt, synthetic construct
  source 1..20: mol_type = other RNA
ctcaccagacccaaatctgc

SEQ ID NO: 3640 - RNA, 20 nt, synthetic construct
  source 1..20: mol_type = other RNA
gaagggagatgcttttctcc

SEQ ID NO: 3641 - RNA, 20 nt, synthetic construct
  source 1..20: mol_type = other RNA
aaatggagttttggtggtgt

SEQ ID NO: 3642 - RNA, 20 nt, synthetic construct
  source 1..20: mol_type = other RNA
tgaagcaggccatcaaacct

SEQ ID NO: 3643 - RNA, 20 nt, synthetic construct
  source 1..20: mol_type = other RNA
aggtttgatggcctgcttca

SEQ ID NO: 3644 - RNA, 20 nt, synthetic construct
  source 1..20: mol_type = other RNA
cacctcttcttccctgaagc

SEQ ID NO: 3645 - RNA, 20 nt, synthetic construct
  source 1..20: mol_type = other RNA
acagtgccagatcctctttt

SEQ ID NO: 3646 - RNA, 20 nt, synthetic construct
  source 1..20: mol_type = other RNA
ctgttcatcaagagatgcaa

SEQ ID NO: 3647 - RNA, 20 nt, synthetic construct
  source 1..20: mol_type = other RNA
ggctgggggaggggggagac

SEQ ID NO: 3648 - RNA, 20 nt, synthetic construct
  source 1..20: mol_type = other RNA
ataatctgtgggcaagaaaa

SEQ ID NO: 3649 - RNA, 20 nt, synthetic construct
  source 1..20: mol_type = other RNA
ttattattatatgcatcata

SEQ ID NO: 3650 - RNA, 20 nt, synthetic construct
  source 1..20: mol_type = other RNA
taaacctatttttatagaga

SEQ ID NO: 3651 - RNA, 20 nt, synthetic construct
  source 1..20: mol_type = other RNA
atctgctggcaccttgatcg

SEQ ID NO: 3652 - RNA, 20 nt, synthetic construct
  source 1..20: mol_type = other RNA
ttgtttctatggccagcttc

SEQ ID NO: 3653 - RNA, 20 nt, synthetic construct
  source 1..20: mol_type = other RNA
gaggtgagtgcagtcatccg

SEQ ID NO: 3654 - RNA, 20 nt, synthetic construct
  source 1..20: mol_type = other RNA
aaaagcagagcatctacatc

SEQ ID NO: 3655 - RNA, 20 nt, synthetic construct
  source 1..20: mol_type = other RNA
caagctagtgatactggagg

SEQ ID NO: 3656 - RNA, 20 nt, synthetic construct
  source 1..20: mol_type = other RNA
aggatagagctgccatttgc

SEQ ID NO: 3657 - RNA, 20 nt, synthetic construct
  source 1..20: mol_type = other RNA
agattacgcgtggcaggggt

SEQ ID NO: 3658 - RNA, 20 nt, synthetic construct
  source 1..20: mol_type = other RNA
aggtgagtgcagtcatccga

SEQ ID NO: 3659 - RNA, 20 nt, synthetic construct
  source 1..20: mol_type = other RNA
cctagagtggtggaagctaa

SEQ ID NO: 3660 - RNA, 20 nt, synthetic construct
  source 1..20: mol_type = other RNA
cgatagacgccggcagcccc

SEQ ID NO: 3661 - RNA, 20 nt, synthetic construct
  source 1..20: mol_type = other RNA
ccccgctgctcaaacctctg

SEQ ID NO: 3662 - RNA, 20 nt, synthetic construct
  source 1..20: mol_type = other RNA
acttttcctcacttatctca

SEQ ID NO: 3663 - RNA, 20 nt, synthetic construct
  source 1..20: mol_type = other RNA
aatcagctgggctttgtggc

SEQ ID NO: 3664 - RNA, 20 nt, synthetic construct
  source 1..20: mol_type = other RNA
gccagtcccagcttctcttg

SEQ ID NO: 3665 - RNA, 20 nt, synthetic construct
  source 1..20: mol_type = other RNA
aggggggagacagggagaat

SEQ ID NO: 3666 - RNA, 20 nt, synthetic construct
  source 1..20: mol_type = other RNA
gtgtgtgtgttgggtgggag

SEQ ID NO: 3667 - RNA, 20 nt, synthetic construct
  source 1..20: mol_type = other RNA
gggaggatcatgagagttgg

SEQ ID NO: 3668 - RNA, 20 nt, synthetic construct
  source 1..20: mol_type = other RNA
aagtgtccttcaaggggtca

SEQ ID NO: 3669 - RNA, 20 nt, synthetic construct
  source 1..20: mol_type = other RNA
taccatcctatggccaccag

SEQ ID NO: 3670 - RNA, 20 nt, synthetic construct
  source 1..20: mol_type = other RNA
cctaccatcctatggccacc

SEQ ID NO: 3671 - RNA, 20 nt, synthetic construct
  source 1..20: mol_type = other RNA
ccagctaccatgggaggctg

SEQ ID NO: 3672 - RNA, 20 nt, synthetic construct
  source 1..20: mol_type = other RNA
ctgattcttccgatacccca

SEQ ID NO: 3673 - RNA, 20 nt, synthetic construct
  source 1..20: mol_type = other RNA
cgtggttgcccaggggctgg

SEQ ID NO: 3674 - RNA, 20 nt, synthetic construct
  source 1..20: mol_type = other RNA
gaggatagagctgccatttg

SEQ ID NO: 3675 - RNA, 20 nt, synthetic construct
  source 1..20: mol_type = other RNA
agtctgaggctggggcaact

SEQ ID NO: 3676 - RNA, 20 nt, synthetic construct
  source 1..20: mol_type = other RNA
agatgcttttctcctggagt

SEQ ID NO: 3677 - RNA, 20 nt, synthetic construct
  source 1..20: mol_type = other RNA
cccatggtgagtacttcgat

SEQ ID NO: 3678 - RNA, 20 nt, synthetic construct
  source 1..20: mol_type = other RNA
caacaattaatgagaaagta

SEQ ID NO: 3679 - RNA, 20 nt, synthetic construct
  source 1..20: mol_type = other RNA
caatttgccctggatggtcc

SEQ ID NO: 3680 - RNA, 20 nt, synthetic construct
  source 1..20: mol_type = other RNA
cgtaacatacccagtaccac

SEQ ID NO: 3681 - RNA, 20 nt, synthetic construct
  source 1..20: mol_type = other RNA
tcttgctgaggaaagaggag

SEQ ID NO: 3682 - RNA, 20 nt, synthetic construct
  source 1..20: mol_type = other RNA
ggtccacaacattgtaccag

SEQ ID NO: 3683 - RNA, 20 nt, synthetic construct
  source 1..20: mol_type = other RNA
tcataatacatctcagaggt

SEQ ID NO: 3684 - RNA, 20 nt, synthetic construct
  source 1..20: mol_type = other RNA
agggatgagctcttaaaaga

SEQ ID NO: 3685 - RNA, 20 nt, synthetic construct
  source 1..20: mol_type = other RNA
cccagggtagggcacacagt

SEQ ID NO: 3686 - RNA, 20 nt, synthetic construct
  source 1..20: mol_type = other RNA
tacagacaaatgctttctgc

SEQ ID NO: 3687 - RNA, 20 nt, synthetic construct
  source 1..20: mol_type = other RNA
taaagcgcgcctttcctcat

SEQ ID NO: 3688 - RNA, 20 nt, synthetic construct
  source 1..20: mol_type = other RNA
agtggcccttttggaccaag

SEQ ID NO: 3689 - RNA, 20 nt, synthetic construct
  source 1..20: mol_type = other RNA
cctcactgagaaggtgatgt

SEQ ID NO: 3690 - RNA, 20 nt, synthetic construct
  source 1..20: mol_type = other RNA
ggagaaaacacaaggaagta

SEQ ID NO: 3691 - RNA, 20 nt, synthetic construct
  source 1..20: mol_type = other RNA
aagctagtgatactggaggg

SEQ ID NO: 3692 - RNA, 20 nt, synthetic construct
  source 1..20: mol_type = other RNA
cgttgagaggagtgcgccgg

SEQ ID NO: 3693 - RNA, 20 nt, synthetic construct
  source 1..20: mol_type = other RNA
tctgggaaatggagttttgg

SEQ ID NO: 3694 - RNA, 20 nt, synthetic construct
  source 1..20: mol_type = other RNA
ttgcccaggggctgggggag

SEQ ID NO: 3695 - RNA, 20 nt, synthetic construct
  source 1..20: mol_type = other RNA
ggggcgaatgtttacagctg

SEQ ID NO: 3696 - RNA, 20 nt, synthetic construct
  source 1..20: mol_type = other RNA
tcaaaatgtctgggaaggcc

SEQ ID NO: 3697 - RNA, 20 nt, synthetic construct
  source 1..20: mol_type = other RNA
tggcccatttcaggagagaa

SEQ ID NO: 3698 - RNA, 20 nt, synthetic construct
  source 1..20: mol_type = other RNA
ttctcagtatttggaaagac

SEQ ID NO: 3699 - RNA, 20 nt, synthetic construct
  source 1..20: mol_type = other RNA
gggtggggaggtcacagaac

SEQ ID NO: 3700 - RNA, 20 nt, synthetic construct
  source 1..20: mol_type = other RNA
ttctggacagttcatttcaa

SEQ ID NO: 3701 - RNA, 20 nt, synthetic construct
  source 1..20: mol_type = other RNA
agaaagaaggaaattgcttc

SEQ ID NO: 3702 - RNA, 20 nt, synthetic construct
  source 1..20: mol_type = other RNA
gcaaggtggtctaacctctt

SEQ ID NO: 3703 - RNA, 20 nt, synthetic construct
  source 1..20: mol_type = other RNA
ttccgccggttgatggcctg

SEQ ID NO: 3704 - RNA, 20 nt, synthetic construct
  source 1..20: mol_type = other RNA
gcccatggtgagtacttcga

SEQ ID NO: 3705 - RNA, 20 nt, synthetic construct
  source 1..20: mol_type = other RNA
ggggcaaacattgtgtatga

SEQ ID NO: 3706 - RNA, 20 nt, synthetic construct
  source 1..20: mol_type = other RNA
taagtatatttacagatttg

SEQ ID NO: 3707 - RNA, 20 nt, synthetic construct
  source 1..20: mol_type = other RNA
ccgtggttgcccaggggctg

SEQ ID NO: 3708 - RNA, 20 nt, synthetic construct
  source 1..20: mol_type = other RNA
aatctgcccgcagatcctgt

SEQ ID NO: 3709 - RNA, 20 nt, synthetic construct
  source 1..20: mol_type = other RNA
acacaaggaagtagggaaca

SEQ ID NO: 3710 - RNA, 20 nt, synthetic construct
  source 1..20: mol_type = other RNA
gccaggctgtcggagaagag

SEQ ID NO: 3711 - RNA, 20 nt, synthetic construct
  source 1..20: mol_type = other RNA
ttaatgtagcaaagtggaca

SEQ ID NO: 3712 - RNA, 20 nt, synthetic construct
  source 1..20: mol_type = other RNA
tgcaacgtgggccagtggga

SEQ ID NO: 3713 - RNA, 20 nt, synthetic construct
  source 1..20: mol_type = other RNA
agctccccaaaccttcccac

SEQ ID NO: 3714 - RNA, 20 nt, synthetic construct
  source 1..20: mol_type = other RNA
agagtggcccttttggacca

SEQ ID NO: 3715 - RNA, 20 nt, synthetic construct
  source 1..20: mol_type = other RNA
actacattaatgtagcaaag

SEQ ID NO: 3716 - RNA, 20 nt, synthetic construct
  source 1..20: mol_type = other RNA
tgactagtcccatgtggtat

SEQ ID NO: 3717 - RNA, 20 nt, synthetic construct
  source 1..20: mol_type = other RNA
gatgctattaataattctgt

SEQ ID NO: 3718 - RNA, 20 nt, synthetic construct
  source 1..20: mol_type = other RNA
ctgcctcgggctccaccccc

SEQ ID NO: 3719 - RNA, 20 nt, synthetic construct
  source 1..20: mol_type = other RNA
ggttgatggcctggggctgc

SEQ ID NO: 3720 - RNA, 20 nt, synthetic construct
  source 1..20: mol_type = other RNA
tagtaagatgtggggccttt

SEQ ID NO: 3721 - RNA, 20 nt, synthetic construct
  source 1..20: mol_type = other RNA
caactcctgaatagcacatt

SEQ ID NO: 3722 - RNA, 20 nt, synthetic construct
  source 1..20: mol_type = other RNA
cgttaatccatatttaaact

SEQ ID NO: 3723 - RNA, 20 nt, synthetic construct
  source 1..20: mol_type = other RNA
gctgggggaggggggagaca

SEQ ID NO: 3724 - RNA, 20 nt, synthetic construct
  source 1..20: mol_type = other RNA
agaaggtttcagcgaagaca

SEQ ID NO: 3725 - RNA, 20 nt, synthetic construct
  source 1..20: mol_type = other RNA
gaaacggaagtctgaggctg

SEQ ID NO: 3726 - RNA, 20 nt, synthetic construct
  source 1..20: mol_type = other RNA
tctacgggaagatatcctgt

SEQ ID NO: 3727 - RNA, 20 nt, synthetic construct
  source 1..20: mol_type = other RNA
gaaaaaaaaaaaaacaagtc

SEQ ID NO: 3728 - RNA, 20 nt, synthetic construct
  source 1..20: mol_type = other RNA
agaaaaacttcacactgcta

SEQ ID NO: 3729 - RNA, 20 nt, synthetic construct
  source 1..20: mol_type = other RNA
ttcttgctgaggaaagagga

SEQ ID NO: 3730 - RNA, 20 nt, synthetic construct
  source 1..20: mol_type = other RNA
caggaattggctctgaaagc

SEQ ID NO: 3731 - RNA, 20 nt, synthetic construct
  source 1..20: mol_type = other RNA
caaaagcagagcatctacat

SEQ ID NO: 3732 - RNA, 20 nt, synthetic construct
  source 1..20: mol_type = other RNA
cccgctgctcaaacctctgg

SEQ ID NO: 3733 - RNA, 20 nt, synthetic construct
  source 1..20: mol_type = other RNA
cacacttgccgtggccagcc

SEQ ID NO: 3734 - RNA, 20 nt, synthetic construct
  source 1..20: mol_type = other RNA
acctatttttatagagatgg

SEQ ID NO: 3735 - RNA, 20 nt, synthetic construct
  source 1..20: mol_type = other RNA
aggagggagggggcaggagc

SEQ ID NO: 3736 - RNA, 20 nt, synthetic construct
  source 1..20: mol_type = other RNA
gtcgatccgtggttgcccag

SEQ ID NO: 3737 - RNA, 20 nt, synthetic construct
  source 1..20: mol_type = other RNA
caagtggctggacgtgcaga

SEQ ID NO: 3738 - RNA, 20 nt, synthetic construct
  source 1..20: mol_type = other RNA
ggatttctcttctttgtgat

SEQ ID NO: 3739 - RNA, 20 nt, synthetic construct
  source 1..20: mol_type = other RNA
gcaattagggtctagttggc

SEQ ID NO: 3740 - RNA, 20 nt, synthetic construct
  source 1..20: mol_type = other RNA
ggggggagacagggagaatg

SEQ ID NO: 3741 - RNA, 20 nt, synthetic construct
  source 1..20: mol_type = other RNA
agagggtggggcctcaaagc

SEQ ID NO: 3742 - RNA, 20 nt, synthetic construct
  source 1..20: mol_type = other RNA
ccatcccactgcctgctttg

SEQ ID NO: 3743 - RNA, 20 nt, synthetic construct
  source 1..20: mol_type = other RNA
aagcaggcagtgggatggag

SEQ ID NO: 3744 - RNA, 20 nt, synthetic construct
  source 1..20: mol_type = other RNA
ccccagaggtttgagcagcg

SEQ ID NO: 3745 - RNA, 20 nt, synthetic construct
  source 1..20: mol_type = other RNA
cagggcatgcaagggaggtg

SEQ ID NO: 3746 - RNA, 20 nt, synthetic construct
  source 1..20: mol_type = other RNA
ttttgttcgttatagaattt

SEQ ID NO: 3747 - RNA, 20 nt, synthetic construct
  source 1..20: mol_type = other RNA
aaatatgattggaggatcaa

SEQ ID NO: 3748 - RNA, 20 nt, synthetic construct
  source 1..20: mol_type = other RNA
ctgctggtttaaagcactga

SEQ ID NO: 3749 - RNA, 20 nt, synthetic construct
  source 1..20: mol_type = other RNA
gattttcttgctgaggaaag

SEQ ID NO: 3750 - RNA, 20 nt, synthetic construct
  source 1..20: mol_type = other RNA
catttgtctgtagacagcct

SEQ ID NO: 3751 - RNA, 20 nt, synthetic construct
  source 1..20: mol_type = other RNA
atccgagggagagaagatgc

SEQ ID NO: 3752 - RNA, 20 nt, synthetic construct
  source 1..20: mol_type = other RNA
ccaacattgcggtgtgaaga

SEQ ID NO: 3753 - RNA, 20 nt, synthetic construct
  source 1..20: mol_type = other RNA
gtagtaagatgtggggcctt

SEQ ID NO: 3754 - RNA, 20 nt, synthetic construct
  source 1..20: mol_type = other RNA
tcaactcctgaatagcacat

SEQ ID NO: 3755 - RNA, 20 nt, synthetic construct
  source 1..20: mol_type = other RNA
agaaaataaattaaaaagca

SEQ ID NO: 3756 - RNA, 20 nt, synthetic construct
  source 1..20: mol_type = other RNA
ccaaaggcaaggggtgttgg

SEQ ID NO: 3757 - RNA, 20 nt, synthetic construct
  source 1..20: mol_type = other RNA
ttgatgttgacctaactgac

SEQ ID NO: 3758 - RNA, 20 nt, synthetic construct
  source 1..20: mol_type = other RNA
ccttccgcccgccccgcaaa

SEQ ID NO: 3759 - RNA, 20 nt, synthetic construct
  source 1..20: mol_type = other RNA
gctgccatttgcggggcggg

SEQ ID NO: 3760 - RNA, 20 nt, synthetic construct
  source 1..20: mol_type = other RNA
ggatagagctgccatttgcg

SEQ ID NO: 3761 - RNA, 20 nt, synthetic construct
  source 1..20: mol_type = other RNA
agcgaggaacatcacacact

SEQ ID NO: 3762 - RNA, 20 nt, synthetic construct
  source 1..20: mol_type = other RNA
aatatgattggaggatcaaa

SEQ ID NO: 3763 - RNA, 20 nt, synthetic construct
  source 1..20: mol_type = other RNA
attgaacccaggcgggcgga

SEQ ID NO: 3764 - RNA, 20 nt, synthetic construct
  source 1..20: mol_type = other RNA
aagtctgaggctggggcaac

SEQ ID NO: 3765 - RNA, 20 nt, synthetic construct
  source 1..20: mol_type = other RNA
gattacgcgtggcaggggtg

SEQ ID NO: 3766 - RNA, 20 nt, synthetic construct
  source 1..20: mol_type = other RNA
taatctgcccgcagatcctg

SEQ ID NO: 3767 - RNA, 20 nt, synthetic construct
  source 1..20: mol_type = other RNA
atagatagtatggaaaatta

SEQ ID NO: 3768 - RNA, 20 nt, synthetic construct
  source 1..20: mol_type = other RNA
tggagaggagagaaagcccc

SEQ ID NO: 3769 - RNA, 20 nt, synthetic construct
  source 1..20: mol_type = other RNA
agaggagagaaagcccctgg

SEQ ID NO: 3770 - RNA, 20 nt, synthetic construct
  source 1..20: mol_type = other RNA
gggctatgcaggggctgcag

SEQ ID NO: 3771 - RNA, 20 nt, synthetic construct
  source 1..20: mol_type = other RNA
ccagggcaaattggggtgta

SEQ ID NO: 3772 - RNA, 20 nt, synthetic construct
  source 1..20: mol_type = other RNA
cgtgggccagtgggaaggtt

SEQ ID NO: 3773 - RNA, 20 nt, synthetic construct
  source 1..20: mol_type = other RNA
ttggtgattaaatcattgtg

SEQ ID NO: 3774 - RNA, 20 nt, synthetic construct
  source 1..20: mol_type = other RNA
tgtctcttgctagctcaaag

SEQ ID NO: 3775 - RNA, 20 nt, synthetic construct
  source 1..20: mol_type = other RNA
gggcaagctagtgatactgg

SEQ ID NO: 3776 - RNA, 20 nt, synthetic construct
  source 1..20: mol_type = other RNA
cttcaattaggaaaaaataa

SEQ ID NO: 3777 - RNA, 20 nt, synthetic construct
  source 1..20: mol_type = other RNA
tagaaaataaattaaaaagc

SEQ ID NO: 3778 - RNA, 20 nt, synthetic construct
  source 1..20: mol_type = other RNA
acctactgtgtgccctaccc

SEQ ID NO: 3779 - RNA, 20 nt, synthetic construct
  source 1..20: mol_type = other RNA
gagtggcccttttggaccaa

SEQ ID NO: 3780 - RNA, 20 nt, synthetic construct
  source 1..20: mol_type = other RNA
ataataaagtgtccttcaag

SEQ ID NO: 3781 - RNA, 20 nt, synthetic construct
  source 1..20: mol_type = other RNA
ctccaccgtcaatagcattc

SEQ ID NO: 3782 - RNA, 20 nt, synthetic construct
  source 1..20: mol_type = other RNA
atgttgctggtgggggtgca

SEQ ID NO: 3783 - RNA, 20 nt, synthetic construct
  source 1..20: mol_type = other RNA
gtacttcgatgggctatgca

SEQ ID NO: 3784 - RNA, 20 nt, synthetic construct
  source 1..20: mol_type = other RNA
ccccagccatgcacaaagat

SEQ ID NO: 3785 - RNA, 20 nt, synthetic construct
  source 1..20: mol_type = other RNA
agtacctgggagagagggtg

SEQ ID NO: 3786 - RNA, 20 nt, synthetic construct
  source 1..20: mol_type = other RNA
gttttgataggcacaggatg

SEQ ID NO: 3787 - RNA, 20 nt, synthetic construct
  source 1..20: mol_type = other RNA
tctgtaacacacgcctgctg

SEQ ID NO: 3788 - RNA, 20 nt, synthetic construct
  source 1..20: mol_type = other RNA
aatagcaaagtggttaaagg

SEQ ID NO: 3789 - RNA, 20 nt, synthetic construct
  source 1..20: mol_type = other RNA
tatcatcagaaaagaaagaa

SEQ ID NO: 3790 - RNA, 20 nt, synthetic construct
  source 1..20: mol_type = other RNA
gaatttaaattaattaaaat

SEQ ID NO: 3791 - RNA, 20 nt, synthetic construct
  source 1..20: mol_type = other RNA
catatattagcagaaactga

SEQ ID NO: 3792 - RNA, 20 nt, synthetic construct
  source 1..20: mol_type = other RNA
ggtggggaggtcacagaaca

SEQ ID NO: 3793 - RNA, 20 nt, synthetic construct
  source 1..20: mol_type = other RNA
acaaatgctttctgcgggag

SEQ ID NO: 3794 - RNA, 20 nt, synthetic construct
  source 1..20: mol_type = other RNA
agggcctcgtgggccatgtg

SEQ ID NO: 3795 - RNA, 20 nt, synthetic construct
  source 1..20: mol_type = other RNA
cctgcgcaaaacgctttggc

SEQ ID NO: 3796 - RNA, 20 nt, synthetic construct
  source 1..20: mol_type = other RNA
ccgctcccccaccccacgac

SEQ ID NO: 3797 - RNA, 20 nt, synthetic construct
  source 1..20: mol_type = other RNA
taagtaccatatacataatg

SEQ ID NO: 3798 - RNA, 20 nt, synthetic construct
  source 1..20: mol_type = other RNA
gtgtgttgggtgggagtggg

SEQ ID NO: 3799 - RNA, 20 nt, synthetic construct
  source 1..20: mol_type = other RNA
aagaaaaaggtggactgaaa

SEQ ID NO: 3800 - RNA, 20 nt, synthetic construct
  source 1..20: mol_type = other RNA
cgttttttaatggatccatg

SEQ ID NO: 3801 - RNA, 20 nt, synthetic construct
  source 1..20: mol_type = other RNA
aatttgccctggatggtcct

SEQ ID NO: 3802 - RNA, 20 nt, synthetic construct
  source 1..20: mol_type = other RNA
ggctggattctgactacact

SEQ ID NO: 3803 - RNA, 20 nt, synthetic construct
  source 1..20: mol_type = other RNA
ctctcctgcgcaaaacgctt

SEQ ID NO: 3804 - RNA, 20 nt, synthetic construct
  source 1..20: mol_type = other RNA
atctcggctcacaacaactt

SEQ ID NO: 3805 - RNA, 20 nt, synthetic construct
  source 1..20: mol_type = other RNA
ttttgataggcacaggatgg

SEQ ID NO: 3806 - RNA, 20 nt, synthetic construct
  source 1..20: mol_type = other RNA
aaagtggacagggcagggag

SEQ ID NO: 3807 - RNA, 20 nt, synthetic construct
  source 1..20: mol_type = other RNA
aagaggtgaaaggaattcga

SEQ ID NO: 3808 - RNA, 20 nt, synthetic construct
  source 1..20: mol_type = other RNA
agaccaaaggcaaggggtgt

SEQ ID NO: 3809 - RNA, 20 nt, synthetic construct
  source 1..20: mol_type = other RNA
aaggttgcattggacactgc

SEQ ID NO: 3810 - RNA, 20 nt, synthetic construct
  source 1..20: mol_type = other RNA
accacactgctgtctctcct

SEQ ID NO: 3811 - RNA, 20 nt, synthetic construct
  source 1..20: mol_type = other RNA
aattaatatcgttgataaat

SEQ ID NO: 3812 - RNA, 20 nt, synthetic construct
  source 1..20: mol_type = other RNA
atgctattaataattctgtt

SEQ ID NO: 3813 - RNA, 20 nt, synthetic construct
  source 1..20: mol_type = other RNA
agggcaccatccagcctgtc

SEQ ID NO: 3814 - RNA, 20 nt, synthetic construct
  source 1..20: mol_type = other RNA
tcataggctagtgtgtgtgt

SEQ ID NO: 3815 - RNA, 20 nt, synthetic construct
  source 1..20: mol_type = other RNA
gaagatggaaggtcagtgtt

SEQ ID NO: 3816 - RNA, 20 nt, synthetic construct
  source 1..20: mol_type = other RNA
ctgggggtggagcccgaggc

SEQ ID NO: 3817 - RNA, 20 nt, synthetic construct
  source 1..20: mol_type = other RNA
ttctgtccctgtgagaaggc

SEQ ID NO: 3818 - RNA, 20 nt, synthetic construct
  source 1..20: mol_type = other RNA
gtatgtcactgaagagagtc

SEQ ID NO: 3819 - RNA, 20 nt, synthetic construct
  source 1..20: mol_type = other RNA
agtcgatccgtggttgccca

SEQ ID NO: 3820 - RNA, 20 nt, synthetic construct
  source 1..20: mol_type = other RNA
cggcggaacgaggtggagtt

SEQ ID NO: 3821 - RNA, 20 nt, synthetic construct
  source 1..20: mol_type = other RNA
ttgtttagaaattattttat

SEQ ID NO: 3822 - RNA, 20 nt, synthetic construct
  source 1..20: mol_type = other RNA
gaggagaaattctgagcaga

SEQ ID NO: 3823 - RNA, 20 nt, synthetic construct
  source 1..20: mol_type = other RNA
aaacattgtgtatgacggcg

SEQ ID NO: 3824 - RNA, 20 nt, synthetic construct
  source 1..20: mol_type = other RNA
tggagaaaacacaaggaagt

SEQ ID NO: 3825 - RNA, 20 nt, synthetic construct
  source 1..20: mol_type = other RNA
tgaagatggaaggtcagtgt

SEQ ID NO: 3826 - RNA, 20 nt, synthetic construct
  source 1..20: mol_type = other RNA
tttaaaaatattgggtgtgg

SEQ ID NO: 3827 - RNA, 20 nt, synthetic construct
  source 1..20: mol_type = other RNA
tagaaggctcctcacagaac

SEQ ID NO: 3828 - RNA, 20 nt, synthetic construct
  source 1..20: mol_type = other RNA
ggtgtaacccaggaccatcc

SEQ ID NO: 3829 - RNA, 20 nt, synthetic construct
  source 1..20: mol_type = other RNA
tttcttgctgaggaaagagg

SEQ ID NO: 3830 - RNA, 20 nt, synthetic construct
  source 1..20: mol_type = other RNA
tctcttctttgtgattggca

SEQ ID NO: 3831 - RNA, 20 nt, synthetic construct
  source 1..20: mol_type = other RNA
aatcgtctgattgctggaga

SEQ ID NO: 3832 - RNA, 20 nt, synthetic construct
  source 1..20: mol_type = other RNA
cattgcggtgtgaagatgga

SEQ ID NO: 3833 - RNA, 20 nt, synthetic construct
  source 1..20: mol_type = other RNA
tgtcgtggggtgggggagcg

SEQ ID NO: 3834 - RNA, 20 nt, synthetic construct
  source 1..20: mol_type = other RNA
gcaagctagtgatactggag

SEQ ID NO: 3835 - RNA, 20 nt, synthetic construct
  source 1..20: mol_type = other RNA
agttttgataggcacaggat

SEQ ID NO: 3836 - RNA, 20 nt, synthetic construct
  source 1..20: mol_type = other RNA
tcaccatgggcatggtccag

SEQ ID NO: 3837 - RNA, 20 nt, synthetic construct
  source 1..20: mol_type = other RNA
gggtacttgagaattgagag

SEQ ID NO: 3838 - RNA, 20 nt, synthetic construct
  source 1..20: mol_type = other RNA
tttcactatttttcctttag

SEQ ID NO: 3839 - RNA, 20 nt, synthetic construct
  source 1..20: mol_type = other RNA
ggaacagggactggtccttt

SEQ ID NO: 3840 - RNA, 20 nt, synthetic construct
  source 1..20: mol_type = other RNA
tgtgttgggtgggagtgggt

SEQ ID NO: 3841 - RNA, 20 nt, synthetic construct
  source 1..20: mol_type = other RNA
acaagcggctagatgtcgag

SEQ ID NO: 3842 - RNA, 20 nt, synthetic construct
  source 1..20: mol_type = other RNA
gtgagtaaccagtggaacaa

SEQ ID NO: 3843 - RNA, 20 nt, synthetic construct
  source 1..20: mol_type = other RNA
ttcatccagatgttagaaat

SEQ ID NO: 3844 - RNA, 20 nt, synthetic construct
  source 1..20: mol_type = other RNA
cgtctgattgctggagaggg

SEQ ID NO: 3845 - RNA, 20 nt, synthetic construct
  source 1..20: mol_type = other RNA
gaggggggagacagggagaa

SEQ ID NO: 3846 - RNA, 20 nt, synthetic construct
  source 1..20: mol_type = other RNA
tcctgcgcaaaacgctttgg

SEQ ID NO: 3847 - RNA, 20 nt, synthetic construct
  source 1..20: mol_type = other RNA
agtttaccaatctttgtgca

SEQ ID NO: 3848 - RNA, 20 nt, synthetic construct
  source 1..20: mol_type = other RNA
gcatccctctggcccagggt

SEQ ID NO: 3849 - RNA, 20 nt, synthetic construct
  source 1..20: mol_type = other RNA
gtgttgggtgggagtgggtg

SEQ ID NO: 3850 - RNA, 20 nt, synthetic construct
  source 1..20: mol_type = other RNA
gaggccccaccctctctccc

SEQ ID NO: 3851 - RNA, 20 nt, synthetic construct
  source 1..20: mol_type = other RNA
tctatcgtgcgctcttccgc

SEQ ID NO: 3852 - RNA, 20 nt, synthetic construct
  source 1..20: mol_type = other RNA
tcattaattgttgcaactta

SEQ ID NO: 3853 - RNA, 20 nt, synthetic construct
  source 1..20: mol_type = other RNA
ccaatccaagagactaaact

SEQ ID NO: 3854 - RNA, 20 nt, synthetic construct
  source 1..20: mol_type = other RNA
gaacagggactggtcctttt

SEQ ID NO: 3855 - RNA, 20 nt, synthetic construct
  source 1..20: mol_type = other RNA
gagacaagtctctctttagc

SEQ ID NO: 3856 - RNA, 20 nt, synthetic construct
  source 1..20: mol_type = other RNA
ggtgagtaaccagtggaaca

SEQ ID NO: 3857 - RNA, 20 nt, synthetic construct
  source 1..20: mol_type = other RNA
tgaccctttctctcctgaaa

SEQ ID NO: 3858 - RNA, 20 nt, synthetic construct
  source 1..20: mol_type = other RNA
tgagaaagtatggcatattc

SEQ ID NO: 3859 - RNA, 20 nt, synthetic construct
  source 1..20: mol_type = other RNA
atttgtctgtagacagcctg

SEQ ID NO: 3860 - RNA, 20 nt, synthetic construct
  source 1..20: mol_type = other RNA
aagggggagcccagacaggc

SEQ ID NO: 3861 - RNA, 20 nt, synthetic construct
  source 1..20: mol_type = other RNA
ctgaggctggggcaactggg

SEQ ID NO: 3862 - RNA, 20 nt, synthetic construct
  source 1..20: mol_type = other RNA
gacggaggcaagagacagtc

SEQ ID NO: 3863 - RNA, 20 nt, synthetic construct
  source 1..20: mol_type = other RNA
aagggctgtttttgtttcta

SEQ ID NO: 3864 - RNA, 20 nt, synthetic construct
  source 1..20: mol_type = other RNA
gaacaacagttgtctttgtg

SEQ ID NO: 3865 - RNA, 20 nt, synthetic construct
  source 1..20: mol_type = other RNA
aatccaacagaaaacaggat

SEQ ID NO: 3866 - RNA, 20 nt, synthetic construct
  source 1..20: mol_type = other RNA
ctgactcaattataagacat

SEQ ID NO: 3867 - RNA, 20 nt, synthetic construct
  source 1..20: mol_type = other RNA
ccatgggaaggaacgctcta

SEQ ID NO: 3868 - RNA, 20 nt, synthetic construct
  source 1..20: mol_type = other RNA
cgcaggagagtggcggcatc

SEQ ID NO: 3869 - RNA, 20 nt, synthetic construct
  source 1..20: mol_type = other RNA
ggcaagctagtgatactgga

SEQ ID NO: 3870 - RNA, 20 nt, synthetic construct
  source 1..20: mol_type = other RNA
tttagtttgccgtctgtagg

SEQ ID NO: 3871 - RNA, 20 nt, synthetic construct
  source 1..20: mol_type = other RNA
atggagttttggtggtgtag

SEQ ID NO: 3872 - RNA, 20 nt, synthetic construct
  source 1..20: mol_type = other RNA
tgtagcaaagtggacagggc

SEQ ID NO: 3873 - RNA, 20 nt, synthetic construct
  source 1..20: mol_type = other RNA
aaataatgattatctttttt

SEQ ID NO: 3874 - RNA, 20 nt, synthetic construct
  source 1..20: mol_type = other RNA
gaccctttctctcctgaaat

SEQ ID NO: 3875 - RNA, 20 nt, synthetic construct
  source 1..20: mol_type = other RNA
gtgaaagaaacggaagtctg

SEQ ID NO: 3876 - RNA, 20 nt, synthetic construct
  source 1..20: mol_type = other RNA
gggtgggggtgtgaaagaaa

SEQ ID NO: 3877 - RNA, 20 nt, synthetic construct
  source 1..20: mol_type = other RNA
gcatcataggggtgtggaaa

SEQ ID NO: 3878 - RNA, 20 nt, synthetic construct
  source 1..20: mol_type = other RNA
atctgtgtaaaagagactcc

SEQ ID NO: 3879 - RNA, 20 nt, synthetic construct
  source 1..20: mol_type = other RNA
ggctatgcaggggctgcagt

SEQ ID NO: 3880 - RNA, 20 nt, synthetic construct
  source 1..20: mol_type = other RNA
aagtctgggaaatggagttt

SEQ ID NO: 3881 - RNA, 20 nt, synthetic construct
  source 1..20: mol_type = other RNA
ggaattcgatggcccatttc

SEQ ID NO: 3882 - RNA, 20 nt, synthetic construct
  source 1..20: mol_type = other RNA
ttatcttacttgcttaacgc

SEQ ID NO: 3883 - RNA, 20 nt, synthetic construct
  source 1..20: mol_type = other RNA
gctgtgaggcagtttctgaa

SEQ ID NO: 3884 - RNA, 20 nt, synthetic construct
  source 1..20: mol_type = other RNA
cggatgtctcatgtaacatg

SEQ ID NO: 3885 - RNA, 20 nt, synthetic construct
  source 1..20: mol_type = other RNA
gggcaccatccagcctgtct

SEQ ID NO: 3886 - RNA, 20 nt, synthetic construct
  source 1..20: mol_type = other RNA
ttatatgcatcataggggtg

SEQ ID NO: 3887 - RNA, 20 nt, synthetic construct
  source 1..20: mol_type = other RNA
ctaccatcaaatatggcacc

SEQ ID NO: 3888 - RNA, 20 nt, synthetic construct
  source 1..20: mol_type = other RNA
ttattgtatttcttgtagag

SEQ ID NO: 3889 - RNA, 20 nt, synthetic construct
  source 1..20: mol_type = other RNA
tgccccctagcagatagtca

SEQ ID NO: 3890 - RNA, 20 nt, synthetic construct
  source 1..20: mol_type = other RNA
tttctgcgggaggggagtct

SEQ ID NO: 3891 - RNA, 20 nt, synthetic construct
  source 1..20: mol_type = other RNA
tggcgggtccctgttgccag

SEQ ID NO: 3892 - RNA, 20 nt, synthetic construct
  source 1..20: mol_type = other RNA
tttgttcaaaatgtctggga

SEQ ID NO: 3893 - RNA, 20 nt, synthetic construct
  source 1..20: mol_type = other RNA
tggctgggggctgctagtcc

SEQ ID NO: 3894 - RNA, 20 nt, synthetic construct
  source 1..20: mol_type = other RNA
ccagctcgatttcaacactg

SEQ ID NO: 3895 - RNA, 20 nt, synthetic construct
  source 1..20: mol_type = other RNA
caaactccacctcgttccgc

SEQ ID NO: 3896 - RNA, 20 nt, synthetic construct
  source 1..20: mol_type = other RNA
tctgtgtaaaagagactcca

SEQ ID NO: 3897 - RNA, 20 nt, synthetic construct
  source 1..20: mol_type = other RNA
gtgtaacccaggaccatcca

SEQ ID NO: 3898 - RNA, 20 nt, synthetic construct
  source 1..20: mol_type = other RNA
taaattaaaaagcagggaga

SEQ ID NO: 3899 - RNA, 20 nt, synthetic construct
  source 1..20: mol_type = other RNA
gctcttaaaagaagggacca

SEQ ID NO: 3900 - RNA, 20 nt, synthetic construct
  source 1..20: mol_type = other RNA
tgtgccctaccctgggccag

SEQ ID NO: 3901 - RNA, 20 nt, synthetic construct
  source 1..20: mol_type = other RNA
attataagacataggaagcc

SEQ ID NO: 3902 - RNA, 20 nt, synthetic construct
  source 1..20: mol_type = other RNA
aatgaatttgagacgcctag

SEQ ID NO: 3903 - RNA, 20 nt, synthetic construct
  source 1..20: mol_type = other RNA
aaacacttggagacagagcg

SEQ ID NO: 3904 - RNA, 20 nt, synthetic construct
  source 1..20: mol_type = other RNA
gtctgcccaatgtgctattc

SEQ ID NO: 3905 - RNA, 20 nt, synthetic construct
  source 1..20: mol_type = other RNA
tcatccctgactatctgcta

SEQ ID NO: 3906 - RNA, 20 nt, synthetic construct
  source 1..20: mol_type = other RNA
agataagaaatagagaaaag

SEQ ID NO: 3907 - RNA, 20 nt, synthetic construct
  source 1..20: mol_type = other RNA
aagaagttggctgggtgcag

SEQ ID NO: 3908 - RNA, 20 nt, synthetic construct
  source 1..20: mol_type = other RNA
gcaaacattgtgtatgacgg

SEQ ID NO: 3909 - RNA, 20 nt, synthetic construct
  source 1..20: mol_type = other RNA
ggcccacgttgcagggcacc

SEQ ID NO: 3910 - RNA, 20 nt, synthetic construct
  source 1..20: mol_type = other RNA
acctagagtccaaggaagag

SEQ ID NO: 3911 - RNA, 20 nt, synthetic construct
  source 1..20: mol_type = other RNA
gtctagaactacatgccaca

SEQ ID NO: 3912 - RNA, 20 nt, synthetic construct
  source 1..20: mol_type = other RNA
ttttctcctggagtcgggct

SEQ ID NO: 3913 - RNA, 20 nt, synthetic construct
  source 1..20: mol_type = other RNA
attccttccctccgggtata

SEQ ID NO: 3914 - RNA, 20 nt, synthetic construct
  source 1..20: mol_type = other RNA
caaacattgtgtatgacggc

SEQ ID NO: 3915 - RNA, 20 nt, synthetic construct
  source 1..20: mol_type = other RNA
ctttcataaccaaatccact

SEQ ID NO: 3916 - RNA, 20 nt, synthetic construct
  source 1..20: mol_type = other RNA
tgtcacagcaggaaatttca

SEQ ID NO: 3917 - RNA, 20 nt, synthetic construct
  source 1..20: mol_type = other RNA
cctcagctcaccatttgctc

SEQ ID NO: 3918 - RNA, 20 nt, synthetic construct
  source 1..20: mol_type = other RNA
ggtgggaggatcatgagagt

SEQ ID NO: 3919 - RNA, 20 nt, synthetic construct
  source 1..20: mol_type = other RNA
ggactcagcccctggcaaca

SEQ ID NO: 3920 - RNA, 20 nt, synthetic construct
  source 1..20: mol_type = other RNA
tggggcctcaaagcaggcag

SEQ ID NO: 3921 - RNA, 20 nt, synthetic construct
  source 1..20: mol_type = other RNA
cgtggggtgggggagcgggg

SEQ ID NO: 3922 - RNA, 20 nt, synthetic construct
  source 1..20: mol_type = other RNA
ttctatggccagcttcagga

SEQ ID NO: 3923 - RNA, 20 nt, synthetic construct
  source 1..20: mol_type = other RNA
agtaagatattttaatacga

SEQ ID NO: 3924 - RNA, 20 nt, synthetic construct
  source 1..20: mol_type = other RNA
actgaaaaggccagagcaaa

SEQ ID NO: 3925 - RNA, 20 nt, synthetic construct
  source 1..20: mol_type = other RNA
ctggtggccataggatggta

SEQ ID NO: 3926 - RNA, 20 nt, synthetic construct
  source 1..20: mol_type = other RNA
gagaaaagaggccaggtgca

SEQ ID NO: 3927 - RNA, 20 nt, synthetic construct
  source 1..20: mol_type = other RNA
tcttttagtttgccgtctgt

SEQ ID NO: 3928 - RNA, 20 nt, synthetic construct
  source 1..20: mol_type = other RNA
tggtacttatactttgattg

SEQ ID NO: 3929 - RNA, 20 nt, synthetic construct
  source 1..20: mol_type = other RNA
ctttctgcgggaggggagtc

SEQ ID NO: 3930 - RNA, 20 nt, synthetic construct
  source 1..20: mol_type = other RNA
taatgaatttgagacgccta

SEQ ID NO: 3931 - RNA, 20 nt, synthetic construct
  source 1..20: mol_type = other RNA
tcactgcctcagcagcgtgg

SEQ ID NO: 3932 - RNA, 20 nt, synthetic construct
  source 1..20: mol_type = other RNA
aaaaaaagtggttgcagaac

SEQ ID NO: 3933 - RNA, 20 nt, synthetic construct
  source 1..20: mol_type = other RNA
tctgggaaggccgggtgtgg

SEQ ID NO: 3934 - RNA, 20 nt, synthetic construct
  source 1..20: mol_type = other RNA
ccagccaaaaatagccagtg

SEQ ID NO: 3935 - RNA, 20 nt, synthetic construct
  source 1..20: mol_type = other RNA
ccacactggctatttttggc

SEQ ID NO: 3936 - RNA, 20 nt, synthetic construct
  source 1..20: mol_type = other RNA
caattagggtctagttggct

SEQ ID NO: 3937 - RNA, 20 nt, synthetic construct
  source 1..20: mol_type = other RNA
tgccagctcgatttcaacac

SEQ ID NO: 3938 - RNA, 20 nt, synthetic construct
  source 1..20: mol_type = other RNA
gagctagcaagagacatcta

SEQ ID NO: 3939 - RNA, 20 nt, synthetic construct
  source 1..20: mol_type = other RNA
actttttttgtgtccactgt

SEQ ID NO: 3940 - RNA, 20 nt, synthetic construct
  source 1..20: mol_type = other RNA
ttaaatagcaaagtggttaa

SEQ ID NO: 3941 - RNA, 20 nt, synthetic construct
  source 1..20: mol_type = other RNA
tgaggaaagaggagggggca

SEQ ID NO: 3942 - RNA, 20 nt, synthetic construct
  source 1..20: mol_type = other RNA
ggggcctcaaagcaggcagt

SEQ ID NO: 3943 - RNA, 20 nt, synthetic construct
  source 1..20: mol_type = other RNA
atagcaaagtggttaaagga

SEQ ID NO: 3944 - RNA, 20 nt, synthetic construct
  source 1..20: mol_type = other RNA
attgtatttcttgtagagag

SEQ ID NO: 3945 - RNA, 20 nt, synthetic construct
  source 1..20: mol_type = other RNA
agggcttccctaagcccaaa

SEQ ID NO: 3946 - RNA, 20 nt, synthetic construct
  source 1..20: mol_type = other RNA
caggctgtcggagaagagtg

SEQ ID NO: 3947 - RNA, 20 nt, synthetic construct
  source 1..20: mol_type = other RNA
ttcaaaatgtctgggaaggc

SEQ ID NO: 3948 - RNA, 20 nt, synthetic construct
  source 1..20: mol_type = other RNA
tgatgttgacctaactgaca

SEQ ID NO: 3949 - RNA, 20 nt, synthetic construct
  source 1..20: mol_type = other RNA
aatctaagattggtgactgg

SEQ ID NO: 3950 - RNA, 20 nt, synthetic construct
  source 1..20: mol_type = other RNA
ccatttgcggggcgggcgga

SEQ ID NO: 3951 - RNA, 20 nt, synthetic construct
  source 1..20: mol_type = other RNA
agtacttcgatgggctatgc

SEQ ID NO: 3952 - RNA, 20 nt, synthetic construct
  source 1..20: mol_type = other RNA
ggttgttagactcagcactg

SEQ ID NO: 3953 - RNA, 20 nt, synthetic construct
  source 1..20: mol_type = other RNA
cctctcgtgaaagagaaaga

SEQ ID NO: 3954 - RNA, 20 nt, synthetic construct
  source 1..20: mol_type = other RNA
aggtagagtacctgggagag

SEQ ID NO: 3955 - RNA, 20 nt, synthetic construct
  source 1..20: mol_type = other RNA
agctagcaagagacatctac

SEQ ID NO: 3956 - RNA, 20 nt, synthetic construct
  source 1..20: mol_type = other RNA
gacagcagtgtggtggctgc

SEQ ID NO: 3957 - RNA, 20 nt, synthetic construct
  source 1..20: mol_type = other RNA
tgagacaggccgatcacttg

SEQ ID NO: 3958 - RNA, 20 nt, synthetic construct
  source 1..20: mol_type = other RNA
tgactactttaagatgcttt

SEQ ID NO: 3959 - RNA, 20 nt, synthetic construct
  source 1..20: mol_type = other RNA
ttgccccctagcagatagtc

SEQ ID NO: 3960 - RNA, 20 nt, synthetic construct
  source 1..20: mol_type = other RNA
aacgtcctctttatagggaa

SEQ ID NO: 3961 - RNA, 20 nt, synthetic construct
  source 1..20: mol_type = other RNA
ctcagtttccttgtgtgtcc

SEQ ID NO: 3962 - RNA, 20 nt, synthetic construct
  source 1..20: mol_type = other RNA
ttcctttcaagtgctgttaa

SEQ ID NO: 3963 - RNA, 20 nt, synthetic construct
  source 1..20: mol_type = other RNA
caaaactccaagaccctagc

SEQ ID NO: 3964 - RNA, 20 nt, synthetic construct
  source 1..20: mol_type = other RNA
ccaggctgtcggagaagagt

SEQ ID NO: 3965 - RNA, 20 nt, synthetic construct
  source 1..20: mol_type = other RNA
gggtggccctgaatcttcct

SEQ ID NO: 3966 - RNA, 20 nt, synthetic construct
  source 1..20: mol_type = other RNA
agcctcactctctgctcaca

SEQ ID NO: 3967 - RNA, 20 nt, synthetic construct
  source 1..20: mol_type = other RNA
tatttccattttttacactc

SEQ ID NO: 3968 - RNA, 20 nt, synthetic construct
  source 1..20: mol_type = other RNA
tttttgttattacttctctt

SEQ ID NO: 3969 - RNA, 20 nt, synthetic construct
  source 1..20: mol_type = other RNA
gatggctttccagttctgtg

SEQ ID NO: 3970 - RNA, 20 nt, synthetic construct
  source 1..20: mol_type = other RNA
ttcttcgcatcgcgggggtg

SEQ ID NO: 3971 - RNA, 20 nt, synthetic construct
  source 1..20: mol_type = other RNA
acgatgttctctgctcttcg

SEQ ID NO: 3972 - RNA, 20 nt, synthetic construct
  source 1..20: mol_type = other RNA
cttcatctgtttccatggga

SEQ ID NO: 3973 - RNA, 20 nt, synthetic construct
  source 1..20: mol_type = other RNA
tcaacactggggtgtcccct

SEQ ID NO: 3974 - RNA, 20 nt, synthetic construct
  source 1..20: mol_type = other RNA
gggtctatgctatgttaccc

SEQ ID NO: 3975 - RNA, 20 nt, synthetic construct
  source 1..20: mol_type = other RNA
agagtacctgggagagaggg

SEQ ID NO: 3976 - RNA, 20 nt, synthetic construct
  source 1..20: mol_type = other RNA
aggagccttctaaagttcaa

SEQ ID NO: 3977 - RNA, 20 nt, synthetic construct
  source 1..20: mol_type = other RNA
gcttcaattaggaaaaaata

SEQ ID NO: 3978 - RNA, 20 nt, synthetic construct
  source 1..20: mol_type = other RNA
ataaatctaagattggtgac

SEQ ID NO: 3979 - RNA, 20 nt, synthetic construct
  source 1..20: mol_type = other RNA
actcaagggggagcccagac

SEQ ID NO: 3980 - RNA, 20 nt, synthetic construct
  source 1..20: mol_type = other RNA
gtggaacttgaggatagacg

SEQ ID NO: 3981 - RNA, 20 nt, synthetic construct
  source 1..20: mol_type = other RNA
gtagcaaagtggacagggca

SEQ ID NO: 3982 - RNA, 20 nt, synthetic construct
  source 1..20: mol_type = other RNA
aggagaaattctgagcagat

SEQ ID NO: 3983 - RNA, 20 nt, synthetic construct
  source 1..20: mol_type = other RNA
aataataaagtgtccttcaa

SEQ ID NO: 3984 - RNA, 20 nt, synthetic construct
  source 1..20: mol_type = other RNA
ttggcgggtccctgttgcca

SEQ ID NO: 3985 - RNA, 20 nt, synthetic construct
  source 1..20: mol_type = other RNA
aacagttgtctttgtgtgga

SEQ ID NO: 3986 - RNA, 20 nt, synthetic construct
  source 1..20: mol_type = other RNA
ctacagacaaatgctttctg

SEQ ID NO: 3987 - RNA, 20 nt, synthetic construct
  source 1..20: mol_type = other RNA
tgtaggcttggcgctatact

SEQ ID NO: 3988 - RNA, 20 nt, synthetic construct
  source 1..20: mol_type = other RNA
ttgtggcacagtgagggaac

SEQ ID NO: 3989 - RNA, 20 nt, synthetic construct
  source 1..20: mol_type = other RNA
cttaaagtagtcagagttac

SEQ ID NO: 3990 - RNA, 20 nt, synthetic construct
  source 1..20: mol_type = other RNA
cttgtagtcccagctaccat

SEQ ID NO: 3991 - RNA, 20 nt, synthetic construct
  source 1..20: mol_type = other RNA
gagcgaggaacatcacacac

SEQ ID NO: 3992 - RNA, 20 nt, synthetic construct
  source 1..20: mol_type = other RNA
ctccagggagctagtgaaac

SEQ ID NO: 3993 - RNA, 20 nt, synthetic construct
  source 1..20: mol_type = other RNA
ctcctgtttctcaagcagat

SEQ ID NO: 3994 - RNA, 20 nt, synthetic construct
  source 1..20: mol_type = other RNA
ggcgcgctttagatacacac

SEQ ID NO: 3995 - RNA, 20 nt, synthetic construct
  source 1..20: mol_type = other RNA
cataggctagtgtgtgtgtt

SEQ ID NO: 3996 - RNA, 20 nt, synthetic construct
  source 1..20: mol_type = other RNA
tagaactacatgccacaggg

SEQ ID NO: 3997 - RNA, 20 nt, synthetic construct
  source 1..20: mol_type = other RNA
catctcagggcatgcaaggg

SEQ ID NO: 3998 - RNA, 20 nt, synthetic construct
  source 1..20: mol_type = other RNA
cggaatgctattgacggtgg

SEQ ID NO: 3999 - RNA, 20 nt, synthetic construct
  source 1..20: mol_type = other RNA
ttcgcatcgcgggggtgggg

SEQ ID NO: 4000 - RNA, 20 nt, synthetic construct
  source 1..20: mol_type = other RNA
atcagcaattagggtctagt

SEQ ID NO: 4001 - RNA, 20 nt, synthetic construct
  source 1..20: mol_type = other RNA
atttgcggggcgggcggaag

SEQ ID NO: 4002 - RNA, 20 nt, synthetic construct
  source 1..20: mol_type = other RNA
ggtggaagctaaaggaagat

SEQ ID NO: 4003 - RNA, 20 nt, synthetic construct
  source 1..20: mol_type = other RNA
acttcttcgcatcgcggggg

SEQ ID NO: 4004 - RNA, 20 nt, synthetic construct
  source 1..20: mol_type = other RNA
ctcctcattacagtgaaata

SEQ ID NO: 4005 - RNA, 20 nt, synthetic construct
  source 1..20: mol_type = other RNA
ggagaaaagcatctcccttc

SEQ ID NO: 4006 - RNA, 20 nt, synthetic construct
  source 1..20: mol_type = other RNA
tggtgattaaatcattgtgt

SEQ ID NO: 4007 - RNA, 20 nt, synthetic construct
  source 1..20: mol_type = other RNA
ttttataattgtgatgataa

SEQ ID NO: 4008 - RNA, 20 nt, synthetic construct
  source 1..20: mol_type = other RNA
atttaaattccaataccaca

SEQ ID NO: 4009 - RNA, 20 nt, synthetic construct
  source 1..20: mol_type = other RNA
tgattgtgtcctctgtcccc

SEQ ID NO: 4010 - RNA, 20 nt, synthetic construct
  source 1..20: mol_type = other RNA
ataatgaatttgagacgcct

SEQ ID NO: 4011 - RNA, 20 nt, synthetic construct
  source 1..20: mol_type = other RNA
tgagaaacataaatcccgag

SEQ ID NO: 4012 - RNA, 20 nt, synthetic construct
  source 1..20: mol_type = other RNA
gtgccctaccctgggccaga

SEQ ID NO: 4013 - RNA, 20 nt, synthetic construct
  source 1..20: mol_type = other RNA
tgaaatgaactgtccagaac

SEQ ID NO: 4014 - RNA, 20 nt, synthetic construct
  source 1..20: mol_type = other RNA
ccatagagcgttccttccca

SEQ ID NO: 4015 - RNA, 20 nt, synthetic construct
  source 1..20: mol_type = other RNA
atgtctcatgtaacatgtgg

SEQ ID NO: 4016 - RNA, 20 nt, synthetic construct
  source 1..20: mol_type = other RNA
tattattatatgcatcatag

SEQ ID NO: 4017 - RNA, 20 nt, synthetic construct
  source 1..20: mol_type = other RNA
agagaaaagaggccaggtgc

SEQ ID NO: 4018 - RNA, 20 nt, synthetic construct
  source 1..20: mol_type = other RNA
agcaatgtttactgggtggg

SEQ ID NO: 4019 - RNA, 20 nt, synthetic construct
  source 1..20: mol_type = other RNA
cagtgttgggaagagtccat

SEQ ID NO: 4020 - RNA, 20 nt, synthetic construct
  source 1..20: mol_type = other RNA
tgggacgacaggtgtaaccc

SEQ ID NO: 4021 - RNA, 20 nt, synthetic construct
  source 1..20: mol_type = other RNA
ttcaaagattgagagggaat

SEQ ID NO: 4022 - RNA, 20 nt, synthetic construct
  source 1..20: mol_type = other RNA
gggccagagggatgctccag

SEQ ID NO: 4023 - RNA, 20 nt, synthetic construct
  source 1..20: mol_type = other RNA
catttgcggggcgggcggaa

SEQ ID NO: 4024 - RNA, 20 nt, synthetic construct
  source 1..20: mol_type = other RNA
cactgctagggttaaatgaa

SEQ ID NO: 4025 - RNA, 20 nt, synthetic construct
  source 1..20: mol_type = other RNA
aatacacatagaaaaatgac

SEQ ID NO: 4026 - RNA, 20 nt, synthetic construct
  source 1..20: mol_type = other RNA
agacccatcctgttttctgt

SEQ ID NO: 4027 - RNA, 20 nt, synthetic construct
  source 1..20: mol_type = other RNA
ctatgctatgttacccaggc

SEQ ID NO: 4028 - RNA, 20 nt, synthetic construct
  source 1..20: mol_type = other RNA
ttgctggtgggggtgcaagg

SEQ ID NO: 4029 - RNA, 20 nt, synthetic construct
  source 1..20: mol_type = other RNA
cactggttactcacccgcta

SEQ ID NO: 4030 - RNA, 20 nt, synthetic construct
  source 1..20: mol_type = other RNA
caccacactgctgtctctcc

SEQ ID NO: 4031 - RNA, 20 nt, synthetic construct
  source 1..20: mol_type = other RNA
gggactagtcatgactacat

SEQ ID NO: 4032 - RNA, 20 nt, synthetic construct
  source 1..20: mol_type = other RNA
ttattagattccagtggtac

SEQ ID NO: 4033 - RNA, 20 nt, synthetic construct
  source 1..20: mol_type = other RNA
ctacttagaaatataccttg

SEQ ID NO: 4034 - RNA, 20 nt, synthetic construct
  source 1..20: mol_type = other RNA
tcgaacaatagactttcaat

SEQ ID NO: 4035 - RNA, 20 nt, synthetic construct
  source 1..20: mol_type = other RNA
gacagggagaatggggagcg

SEQ ID NO: 4036 - RNA, 20 nt, synthetic construct
  source 1..20: mol_type = other RNA
ccaacatcaccttctcagtg

SEQ ID NO: 4037 - RNA, 20 nt, synthetic construct
  source 1..20: mol_type = other RNA
cctcaaagcaggcagtggga

SEQ ID NO: 4038 - RNA, 20 nt, synthetic construct
  source 1..20: mol_type = other RNA
atcggggtatgtttacacaa

SEQ ID NO: 4039 - RNA, 20 nt, synthetic construct
  source 1..20: mol_type = other RNA
tttcgtacaatactggaggc

SEQ ID NO: 4040 - RNA, 20 nt, synthetic construct
  source 1..20: mol_type = other RNA
ttcgcccctagacactgccg

SEQ ID NO: 4041 - RNA, 20 nt, synthetic construct
  source 1..20: mol_type = other RNA
tgccctgagatggggacaag

SEQ ID NO: 4042 - RNA, 20 nt, synthetic construct
  source 1..20: mol_type = other RNA
gggagctagtgaaacaggaa

SEQ ID NO: 4043 - RNA, 20 nt, synthetic construct
  source 1..20: mol_type = other RNA
aatcttaaatcatctaattg

SEQ ID NO: 4044 - RNA, 20 nt, synthetic construct
  source 1..20: mol_type = other RNA
aaatccaacagaaaacagga

SEQ ID NO: 4045 - RNA, 20 nt, synthetic construct
  source 1..20: mol_type = other RNA
atgtaaaccagttgtctgtt

SEQ ID NO: 4046 - RNA, 20 nt, synthetic construct
  source 1..20: mol_type = other RNA
accaaatccacttggctcaa

SEQ ID NO: 4047 - RNA, 20 nt, synthetic construct
  source 1..20: mol_type = other RNA
atcgaacaatagactttcaa

SEQ ID NO: 4048 - RNA, 20 nt, synthetic construct
  source 1..20: mol_type = other RNA
aggctagtgtgtgtgttggg

SEQ ID NO: 4049 - RNA, 20 nt, synthetic construct
  source 1..20: mol_type = other RNA
gggactcagcccctggcaac

SEQ ID NO: 4050 - RNA, 20 nt, synthetic construct
  source 1..20: mol_type = other RNA
tttggcgggtccctgttgcc

SEQ ID NO: 4051 - RNA, 20 nt, synthetic construct
  source 1..20: mol_type = other RNA
ttagctgagcgtggcagcgc

SEQ ID NO: 4052 - RNA, 20 nt, synthetic construct
  source 1..20: mol_type = other RNA
agtctagaactacatgccac

SEQ ID NO: 4053 - RNA, 20 nt, synthetic construct
  source 1..20: mol_type = other RNA
tgtcgagaggagcacattgg

SEQ ID NO: 4054 - RNA, 20 nt, synthetic construct
  source 1..20: mol_type = other RNA
tgtggtagtagtaagatgtg

SEQ ID NO: 4055 - RNA, 20 nt, synthetic construct
  source 1..20: mol_type = other RNA
actgctagggttaaatgaaa

SEQ ID NO: 4056 - RNA, 20 nt, synthetic construct
  source 1..20: mol_type = other RNA
aaaaaatcctaacagacaac

SEQ ID NO: 4057 - RNA, 20 nt, synthetic construct
  source 1..20: mol_type = other RNA
tgtggcacagtgagggaact

SEQ ID NO: 4058 - RNA, 20 nt, synthetic construct
  source 1..20: mol_type = other RNA
taattaaaattggccgggcg

SEQ ID NO: 4059 - RNA, 20 nt, synthetic construct
  source 1..20: mol_type = other RNA
ccaaaccggaatgctattga

SEQ ID NO: 4060 - RNA, 20 nt, synthetic construct
  source 1..20: mol_type = other RNA
tctatttcttatctcctgag

SEQ ID NO: 4061 - RNA, 20 nt, synthetic construct
  source 1..20: mol_type = other RNA
tctgtccctgtgagaaggca

SEQ ID NO: 4062 - RNA, 20 nt, synthetic construct
  source 1..20: mol_type = other RNA
ctcggcttcatctgtttcca

SEQ ID NO: 4063 - RNA, 20 nt, synthetic construct
  source 1..20: mol_type = other RNA
gagagttggaggctgcagtg

SEQ ID NO: 4064 - RNA, 20 nt, synthetic construct
  source 1..20: mol_type = other RNA
taaaagagaaaccttgggcc

SEQ ID NO: 4065 - RNA, 20 nt, synthetic construct
  source 1..20: mol_type = other RNA
tattccttccctccgggtat

SEQ ID NO: 4066 - RNA, 20 nt, synthetic construct
  source 1..20: mol_type = other RNA
ccaaggtatatttctaagta

SEQ ID NO: 4067 - RNA, 20 nt, synthetic construct
  source 1..20: mol_type = other RNA
caaaaatagccagtgtggct

SEQ ID NO: 4068 - RNA, 20 nt, synthetic construct
  source 1..20: mol_type = other RNA
acagggagaatggggagcga

SEQ ID NO: 4069 - RNA, 20 nt, synthetic construct
  source 1..20: mol_type = other RNA
aatattgggtgtggtggcac

SEQ ID NO: 4070 - RNA, 20 nt, synthetic construct
  source 1..20: mol_type = other RNA
ttcctgtttcactagctccc

SEQ ID NO: 4071 - RNA, 20 nt, synthetic construct
  source 1..20: mol_type = other RNA
aagtaccatatacataatgt

SEQ ID NO: 4072 - RNA, 20 nt, synthetic construct
  source 1..20: mol_type = other RNA
aaattatgaatgattaaaaa

SEQ ID NO: 4073 - RNA, 20 nt, synthetic construct
  source 1..20: mol_type = other RNA
ttcgtacaatactggaggct

SEQ ID NO: 4074 - RNA, 20 nt, synthetic construct
  source 1..20: mol_type = other RNA
ataaaagagaaaccttgggc

SEQ ID NO: 4075 - RNA, 20 nt, synthetic construct
  source 1..20: mol_type = other RNA
tgttttttattagattccag

SEQ ID NO: 4076 - RNA, 20 nt, synthetic construct
  source 1..20: mol_type = other RNA
cctacttagaaatatacctt

SEQ ID NO: 4077 - RNA, 20 nt, synthetic construct
  source 1..20: mol_type = other RNA
gcagagaacatcgtctctcc

SEQ ID NO: 4078 - RNA, 20 nt, synthetic construct
  source 1..20: mol_type = other RNA
tgtcccctggagcatccctc

SEQ ID NO: 4079 - RNA, 20 nt, synthetic construct
  source 1..20: mol_type = other RNA
ctctaaagatttgccagttc

SEQ ID NO: 4080 - RNA, 20 nt, synthetic construct
  source 1..20: mol_type = other RNA
ttctcaagcagattggaagc

SEQ ID NO: 4081 - RNA, 20 nt, synthetic construct
  source 1..20: mol_type = other RNA
ggtagagtacctgggagaga

SEQ ID NO: 4082 - RNA, 20 nt, synthetic construct
  source 1..20: mol_type = other RNA
ccagggatgaagcaggaagc

SEQ ID NO: 4083 - RNA, 20 nt, synthetic construct
  source 1..20: mol_type = other RNA
ccaaacccacggcagtgtct

SEQ ID NO: 4084 - RNA, 20 nt, synthetic construct
  source 1..20: mol_type = other RNA
caggagagacagcagtgtgg

SEQ ID NO: 4085 - RNA, 20 nt, synthetic construct
  source 1..20: mol_type = other RNA
gcctcactctctgctcacaa

SEQ ID NO: 4086 - RNA, 20 nt, synthetic construct
  source 1..20: mol_type = other RNA
gaaaaatgacaggaaatgac

SEQ ID NO: 4087 - RNA, 20 nt, synthetic construct
  source 1..20: mol_type = other RNA
caagccacactggctatttt

SEQ ID NO: 4088 - RNA, 20 nt, synthetic construct
  source 1..20: mol_type = other RNA
tcggatgactgcactcacct

SEQ ID NO: 4089 - RNA, 20 nt, synthetic construct
  source 1..20: mol_type = other RNA
agtaggttgccaagccacac

SEQ ID NO: 4090 - RNA, 20 nt, synthetic construct
  source 1..20: mol_type = other RNA
actctcttcagtgacataca

SEQ ID NO: 4091 - RNA, 20 nt, synthetic construct
  source 1..20: mol_type = other RNA
aaaagggccactctgctgtg

SEQ ID NO: 4092 - RNA, 20 nt, synthetic construct
  source 1..20: mol_type = other RNA
atgttggagcaaagattcga

SEQ ID NO: 4093 - RNA, 20 nt, synthetic construct
  source 1..20: mol_type = other RNA
caacatcaccttctcagtga

SEQ ID NO: 4094 - RNA, 20 nt, synthetic construct
  source 1..20: mol_type = other RNA
taataataaagtgtccttca

SEQ ID NO: 4095 - RNA, 20 nt, synthetic construct
  source 1..20: mol_type = other RNA
aaaaaagtggttgcagaaca

SEQ ID NO: 4096 - RNA, 20 nt, synthetic construct
  source 1..20: mol_type = other RNA
aatggagttttggtggtgta

SEQ ID NO: 4097 - RNA, 20 nt, synthetic construct
  source 1..20: mol_type = other RNA
ttaaagtagtcagagttact

SEQ ID NO: 4098 - RNA, 20 nt, synthetic construct
  source 1..20: mol_type = other RNA
ggtctaattttaaaatgctt

SEQ ID NO: 4099 - RNA, 20 nt, synthetic construct
  source 1..20: mol_type = other RNA
taaatgagaaaagcataaca

SEQ ID NO: 4100 - RNA, 20 nt, synthetic construct
  source 1..20: mol_type = other RNA
aattagggtctagttggctg

SEQ ID NO: 4101 - RNA, 20 nt, synthetic construct
  source 1..20: mol_type = other RNA
gggagcgagggcttaatgtt

SEQ ID NO: 4102 - RNA, 20 nt, synthetic construct
  source 1..20: mol_type = other RNA
tgtctttcgcttagcatatg

SEQ ID NO: 4103 - RNA, 20 nt, synthetic construct
  source 1..20: mol_type = other RNA
ttggagcaaagattcgaagg

SEQ ID NO: 4104 - RNA, 20 nt, synthetic construct
  source 1..20: mol_type = other RNA
ttaacacaattagctgagcg

SEQ ID NO: 4105 - RNA, 20 nt, synthetic construct
  source 1..20: mol_type = other RNA
ttgtacgaaataaatttctg

SEQ ID NO: 4106 - RNA, 20 nt, synthetic construct
  source 1..20: mol_type = other RNA
gaaagcaggcctctcttcct

SEQ ID NO: 4107 - RNA, 20 nt, synthetic construct
  source 1..20: mol_type = other RNA
catgagatgcatccaccctg

SEQ ID NO: 4108 - RNA, 20 nt, synthetic construct
  source 1..20: mol_type = other RNA
tcagcactgtggaagaaaca

SEQ ID NO: 4109 - RNA, 20 nt, synthetic construct
  source 1..20: mol_type = other RNA
cttcttcgcatcgcgggggt

SEQ ID NO: 4110 - RNA, 20 nt, synthetic construct
  source 1..20: mol_type = other RNA
aaccagtggaacaagggccc

SEQ ID NO: 4111 - RNA, 20 nt, synthetic construct
  source 1..20: mol_type = other RNA
cttccctccgggtatagggc

SEQ ID NO: 4112 - RNA, 20 nt, synthetic construct
  source 1..20: mol_type = other RNA
atccctgactatctgctagg

SEQ ID NO: 4113 - RNA, 20 nt, synthetic construct
  source 1..20: mol_type = other RNA
tcggcttcatctgtttccat

SEQ ID NO: 4114 - RNA, 20 nt, synthetic construct
  source 1..20: mol_type = other RNA
aggcaaagaaattctatgga

SEQ ID NO: 4115 - RNA, 20 nt, synthetic construct
  source 1..20: mol_type = other RNA
cctggtggccataggatggt

SEQ ID NO: 4116 - RNA, 20 nt, synthetic construct
  source 1..20: mol_type = other RNA
cagcgcgtggtccctgcctc

SEQ ID NO: 4117 - RNA, 20 nt, synthetic construct
  source 1..20: mol_type = other RNA
tgggggtggagcccgaggca

SEQ ID NO: 4118 - RNA, 20 nt, synthetic construct
  source 1..20: mol_type = other RNA
gagaaaccttgggccgggca

SEQ ID NO: 4119 - RNA, 20 nt, synthetic construct
  source 1..20: mol_type = other RNA
ctgactactttaagatgctt

SEQ ID NO: 4120 - RNA, 20 nt, synthetic construct
  source 1..20: mol_type = other RNA
gatggatggcgaagccactc

SEQ ID NO: 4121 - RNA, 20 nt, synthetic construct
  source 1..20: mol_type = other RNA
gctttggtggtaaaaaatac

SEQ ID NO: 4122 - RNA, 20 nt, synthetic construct
  source 1..20: mol_type = other RNA
cccaaggtatatttctaagt

SEQ ID NO: 4123 - RNA, 20 nt, synthetic construct
  source 1..20: mol_type = other RNA
ggctagtgtgtgtgttgggt

SEQ ID NO: 4124 - RNA, 20 nt, synthetic construct
  source 1..20: mol_type = other RNA
cctcagcctcccatggtagc

SEQ ID NO: 4125 - RNA, 20 nt, synthetic construct
  source 1..20: mol_type = other RNA
gcagcgcgtggtccctgcct

SEQ ID NO: 4126 - RNA, 20 nt, synthetic construct
  source 1..20: mol_type = other RNA
tattagattccagtggtact

SEQ ID NO: 4127 - RNA, 20 nt, synthetic construct
  source 1..20: mol_type = other RNA
gaaaacctagtttagtctct

SEQ ID NO: 4128 - RNA, 20 nt, synthetic construct
  source 1..20: mol_type = other RNA
ctggagtcgggcttggtagg

SEQ ID NO: 4129 - RNA, 20 nt, synthetic construct
  source 1..20: mol_type = other RNA
attaattaaaattggccggg

SEQ ID NO: 4130 - RNA, 20 nt, synthetic construct
  source 1..20: mol_type = other RNA
agattcattcattcattcct

SEQ ID NO: 4131 - RNA, 20 nt, synthetic construct
  source 1..20: mol_type = other RNA
ttcacttaggcgttggatga

SEQ ID NO: 4132 - RNA, 20 nt, synthetic construct
  source 1..20: mol_type = other RNA
tttgaggcaaagaaattcta

SEQ ID NO: 4133 - RNA, 20 nt, synthetic construct
  source 1..20: mol_type = other RNA
gagacagtctggcacatttg

SEQ ID NO: 4134 - RNA, 20 nt, synthetic construct
  source 1..20: mol_type = other RNA
ctcagcctcccatggtagct

SEQ ID NO: 4135 - RNA, 20 nt, synthetic construct
  source 1..20: mol_type = other RNA
ctcccttgcatgccctgaga

SEQ ID NO: 4136 - RNA, 20 nt, synthetic construct
  source 1..20: mol_type = other RNA
ttaattaaaattggccgggc

SEQ ID NO: 4137 - RNA, 20 nt, synthetic construct
  source 1..20: mol_type = other RNA
tagtcatgactagtcccatg

SEQ ID NO: 4138 - RNA, 20 nt, synthetic construct
  source 1..20: mol_type = other RNA
tagtcacatttctcagtatt

SEQ ID NO: 4139 - RNA, 20 nt, synthetic construct
  source 1..20: mol_type = other RNA
tgaggagacactgccactga

SEQ ID NO: 4140 - RNA, 20 nt, synthetic construct
  source 1..20: mol_type = other RNA
ctgagcaaacctagagtcca

SEQ ID NO: 4141 - RNA, 20 nt, synthetic construct
  source 1..20: mol_type = other RNA
agcttcaggagggagggggc

SEQ ID NO: 4142 - RNA, 20 nt, synthetic construct
  source 1..20: mol_type = other RNA
aacgtttctatcatcgcaga

SEQ ID NO: 4143 - RNA, 20 nt, synthetic construct
  source 1..20: mol_type = other RNA
tgtatgacggcggggcgcgg

SEQ ID NO: 4144 - RNA, 20 nt, synthetic construct
  source 1..20: mol_type = other RNA
tgggccagagggatgctcca

SEQ ID NO: 4145 - RNA, 20 nt, synthetic construct
  source 1..20: mol_type = other RNA
attagggtctagttggctgg

SEQ ID NO: 4146 - RNA, 20 nt, synthetic construct
  source 1..20: mol_type = other RNA
agaaaaatgacaggaaatga

SEQ ID NO: 4147 - RNA, 20 nt, synthetic construct
  source 1..20: mol_type = other RNA
gtgtgatattccttccctcc

SEQ ID NO: 4148 - RNA, 20 nt, synthetic construct
  source 1..20: mol_type = other RNA
ttgtgtatgacggcggggcg

SEQ ID NO: 4149 - RNA, 20 nt, synthetic construct
  source 1..20: mol_type = other RNA
ccaatctttgtgcatggctg

SEQ ID NO: 4150 - RNA, 20 nt, synthetic construct
  source 1..20: mol_type = other RNA
tgcaaaggaaatcagcaatt

SEQ ID NO: 4151 - RNA, 20 nt, synthetic construct
  source 1..20: mol_type = other RNA
agaaagcccctggtggccat

SEQ ID NO: 4152 - RNA, 20 nt, synthetic construct
  source 1..20: mol_type = other RNA
gctattaaaaaggatgaggt

SEQ ID NO: 4153 - RNA, 20 nt, synthetic construct
  source 1..20: mol_type = other RNA
tatggccagcttcaggaggg

SEQ ID NO: 4154 - RNA, 20 nt, synthetic construct
  source 1..20: mol_type = other RNA
ttatcagtcattttttgtat

SEQ ID NO: 4155 - RNA, 20 nt, synthetic construct
  source 1..20: mol_type = other RNA
ccataggatggtagggattt

SEQ ID NO: 4156 - RNA, 20 nt, synthetic construct
  source 1..20: mol_type = other RNA
ccactgaaggacagaagcag

SEQ ID NO: 4157 - RNA, 20 nt, synthetic construct
  source 1..20: mol_type = other RNA
agggtttcctcacagcagag

SEQ ID NO: 4158 - RNA, 20 nt, synthetic construct
  source 1..20: mol_type = other RNA
gccagctcgatttcaacact

SEQ ID NO: 4159 - RNA, 20 nt, synthetic construct
  source 1..20: mol_type = other RNA
aagttccacaaagcctcaca

SEQ ID NO: 4160 - RNA, 20 nt, synthetic construct
  source 1..20: mol_type = other RNA
attatcagtcattttttgta

SEQ ID NO: 4161 - RNA, 20 nt, synthetic construct
  source 1..20: mol_type = other RNA
ctatctccatgaccccttga

SEQ ID NO: 4162 - RNA, 20 nt, synthetic construct
  source 1..20: mol_type = other RNA
gactactttaagatgctttg

SEQ ID NO: 4163 - RNA, 20 nt, synthetic construct
  source 1..20: mol_type = other RNA
gactggtccttttgggctta

SEQ ID NO: 4164 - RNA, 20 nt, synthetic construct
  source 1..20: mol_type = other RNA
atgtggtagtagtaagatgt

SEQ ID NO: 4165 - RNA, 20 nt, synthetic construct
  source 1..20: mol_type = other RNA
tacatggcctttgagccaag

SEQ ID NO: 4166 - RNA, 20 nt, synthetic construct
  source 1..20: mol_type = other RNA
catcaaccggcggaacgagg

SEQ ID NO: 4167 - RNA, 20 nt, synthetic construct
  source 1..20: mol_type = other RNA
ggactggtccttttgggctt

SEQ ID NO: 4168 - RNA, 20 nt, synthetic construct
  source 1..20: mol_type = other RNA
tggtgtatctgcttcagcat

SEQ ID NO: 4169 - RNA, 20 nt, synthetic construct
  source 1..20: mol_type = other RNA
aaatattgggtgtggtggca

SEQ ID NO: 4170 - RNA, 20 nt, synthetic construct
  source 1..20: mol_type = other RNA
gaaacataaatcccgagagg

SEQ ID NO: 4171 - RNA, 20 nt, synthetic construct
  source 1..20: mol_type = other RNA
ctacctcctgcccacctctc

SEQ ID NO: 4172 - RNA, 20 nt, synthetic construct
  source 1..20: mol_type = other RNA
agatgtcgagaggagcacat

SEQ ID NO: 4173 - RNA, 20 nt, synthetic construct
  source 1..20: mol_type = other RNA
ctctgtaacacacgcctgct

SEQ ID NO: 4174 - RNA, 20 nt, synthetic construct
  source 1..20: mol_type = other RNA
ctgggccagagggatgctcc

SEQ ID NO: 4175 - RNA, 20 nt, synthetic construct
  source 1..20: mol_type = other RNA
aaaataggtttaaaaatatt

SEQ ID NO: 4176 - RNA, 20 nt, synthetic construct
  source 1..20: mol_type = other RNA
aaaccttgggccgggcatgg

SEQ ID NO: 4177 - RNA, 20 nt, synthetic construct
  source 1..20: mol_type = other RNA
cagagcaaatggtgagctga

SEQ ID NO: 4178 - RNA, 20 nt, synthetic construct
  source 1..20: mol_type = other RNA
accttcattgctacttgaga

SEQ ID NO: 4179 - RNA, 20 nt, synthetic construct
  source 1..20: mol_type = other RNA
ctagtttagtctcttggatt

SEQ ID NO: 4180 - RNA, 20 nt, synthetic construct
  source 1..20: mol_type = other RNA
agtctggcacatttgtggct

SEQ ID NO: 4181 - RNA, 20 nt, synthetic construct
  source 1..20: mol_type = other RNA
acatatgagcatttccagtt

SEQ ID NO: 4182 - RNA, 20 nt, synthetic construct
  source 1..20: mol_type = other RNA
ccctacttagaaatatacct

SEQ ID NO: 4183 - RNA, 20 nt, synthetic construct
  source 1..20: mol_type = other RNA
atatggtacctcagaacccc

SEQ ID NO: 4184 - RNA, 20 nt, synthetic construct
  source 1..20: mol_type = other RNA
gaaacccttgttgtcacagc

SEQ ID NO: 4185 - RNA, 20 nt, synthetic construct
  source 1..20: mol_type = other RNA
tggtggaagctaaaggaaga

SEQ ID NO: 4186 - RNA, 20 nt, synthetic construct
  source 1..20: mol_type = other RNA
catatgagcatttccagttt

SEQ ID NO: 4187 - RNA, 20 nt, synthetic construct
  source 1..20: mol_type = other RNA
tcgcccctagacactgccgt

SEQ ID NO: 4188 - RNA, 20 nt, synthetic construct
  source 1..20: mol_type = other RNA
catccctgactatctgctag

SEQ ID NO: 4189 - RNA, 20 nt, synthetic construct
  source 1..20: mol_type = other RNA
gcaaaggaaatcagcaatta

SEQ ID NO: 4190 - RNA, 20 nt, synthetic construct
  source 1..20: mol_type = other RNA
ccagagcaaatggtgagctg

SEQ ID NO: 4191 - RNA, 20 nt, synthetic construct
  source 1..20: mol_type = other RNA
tttgttttgttcaaaatgtc

SEQ ID NO: 4192 - RNA, 20 nt, synthetic construct
  source 1..20: mol_type = other RNA
gtgtcctgccctatacccgg

SEQ ID NO: 4193 - RNA, 20 nt, synthetic construct
  source 1..20: mol_type = other RNA
gtagacagcctggggttctg

SEQ ID NO: 4194 - RNA, 20 nt, synthetic construct
  source 1..20: mol_type = other RNA
taattttatgcttttcttct

SEQ ID NO: 4195 - RNA, 20 nt, synthetic construct
  source 1..20: mol_type = other RNA
ccccagtgttgaaatcgagc

SEQ ID NO: 4196 - RNA, 20 nt, synthetic construct
  source 1..20: mol_type = other RNA
tggggtttgcagaatgacct

SEQ ID NO: 4197 - RNA, 20 nt, synthetic construct
  source 1..20: mol_type = other RNA
cctaaatccctaccatccta

SEQ ID NO: 4198 - RNA, 20 nt, synthetic construct
  source 1..20: mol_type = other RNA
caaacccacggcagtgtcta

SEQ ID NO: 4199 - RNA, 20 nt, synthetic construct
  source 1..20: mol_type = other RNA
cagtggaagtgttaagtggc

SEQ ID NO: 4200 - RNA, 20 nt, synthetic construct
  source 1..20: mol_type = other RNA
gtgatgataaaggctttgtg

SEQ ID NO: 4201 - RNA, 20 nt, synthetic construct
  source 1..20: mol_type = other RNA
tatgggtttctataatctgt

SEQ ID NO: 4202 - RNA, 20 nt, synthetic construct
  source 1..20: mol_type = other RNA
actgctgtggagaaaacaca

SEQ ID NO: 4203 - RNA, 20 nt, synthetic construct
  source 1..20: mol_type = other RNA
ccccatctcagggcatgcaa

SEQ ID NO: 4204 - RNA, 20 nt, synthetic construct
  source 1..20: mol_type = other RNA
aatgtggtagtagtaagatg

SEQ ID NO: 4205 - RNA, 20 nt, synthetic construct
  source 1..20: mol_type = other RNA
tattatttcaaagattgaga

SEQ ID NO: 4206 - RNA, 20 nt, synthetic construct
  source 1..20: mol_type = other RNA
atattatttcaaagattgag

SEQ ID NO: 4207 - RNA, 20 nt, synthetic construct
  source 1..20: mol_type = other RNA
aaacccacggcagtgtctag

SEQ ID NO: 4208 - RNA, 20 nt, synthetic construct
  source 1..20: mol_type = other RNA
agggatgctccaggggacag

SEQ ID NO: 4209 - RNA, 20 nt, synthetic construct
  source 1..20: mol_type = other RNA
cagaggtgggactcagcccc

SEQ ID NO: 4210 - RNA, 20 nt, synthetic construct
  source 1..20: mol_type = other RNA
agcaacatatgacacagttc

SEQ ID NO: 4211 - RNA, 20 nt, synthetic construct
  source 1..20: mol_type = other RNA
agtgaggcttccatttcaga

SEQ ID NO: 4212 - RNA, 20 nt, synthetic construct
  source 1..20: mol_type = other RNA
ttcagggaagaagaggtgaa

SEQ ID NO: 4213 - RNA, 20 nt, synthetic construct
  source 1..20: mol_type = other RNA
tttcaggagagaaagggtca

SEQ ID NO: 4214 - RNA, 20 nt, synthetic construct
  source 1..20: mol_type = other RNA
tccccatctcagggcatgca

SEQ ID NO: 4215 - RNA, 20 nt, synthetic construct
  source 1..20: mol_type = other RNA
agcccctggtggccatagga

SEQ ID NO: 4216 - RNA, 20 nt, synthetic construct
  source 1..20: mol_type = other RNA
gaatcgtctgattgctggag

SEQ ID NO: 4217 - RNA, 20 nt, synthetic construct
  source 1..20: mol_type = other RNA
aagacataggaagccaggtg

SEQ ID NO: 4218 - RNA, 20 nt, synthetic construct
  source 1..20: mol_type = other RNA
gcctctcttccttggactct

SEQ ID NO: 4219 - RNA, 20 nt, synthetic construct
  source 1..20: mol_type = other RNA
ggagcgagggcttaatgttt

SEQ ID NO: 4220 - RNA, 20 nt, synthetic construct
  source 1..20: mol_type = other RNA
acattgcataaatctaagat

SEQ ID NO: 4221 - RNA, 20 nt, synthetic construct
  source 1..20: mol_type = other RNA
gggagcccagacaggctgga

SEQ ID NO: 4222 - RNA, 20 nt, synthetic construct
  source 1..20: mol_type = other RNA
aaacataaatcccgagaggt

SEQ ID NO: 4223 - RNA, 20 nt, synthetic construct
  source 1..20: mol_type = other RNA
tctacctcctgcccacctct

SEQ ID NO: 4224 - RNA, 20 nt, synthetic construct
  source 1..20: mol_type = other RNA
ggccatcaaccggcggaacg

SEQ ID NO: 4225 - RNA, 20 nt, synthetic construct
  source 1..20: mol_type = other RNA
aggcgttgagaggagtgcgc

SEQ ID NO: 4226 - RNA, 20 nt, synthetic construct
  source 1..20: mol_type = other RNA
tgtcctgccctatacccgga

SEQ ID NO: 4227 - RNA, 20 nt, synthetic construct
  source 1..20: mol_type = other RNA
atgctttggtaaacatttct

SEQ ID NO: 4228 - RNA, 20 nt, synthetic construct
  source 1..20: mol_type = other RNA
gtgggccatgtgaggctttg

SEQ ID NO: 4229 - RNA, 20 nt, synthetic construct
  source 1..20: mol_type = other RNA
ggcgggataatcacttgagc

SEQ ID NO: 4230 - RNA, 20 nt, synthetic construct
  source 1..20: mol_type = other RNA
ctggtgacaatataattcca

SEQ ID NO: 4231 - RNA, 20 nt, synthetic construct
  source 1..20: mol_type = other RNA
ggccagcttcaggagggagg

SEQ ID NO: 4232 - RNA, 20 nt, synthetic construct
  source 1..20: mol_type = other RNA
taggactgggccttctgaaa

SEQ ID NO: 4233 - RNA, 20 nt, synthetic construct
  source 1..20: mol_type = other RNA
tcccttgcatgccctgagat

SEQ ID NO: 4234 - RNA, 20 nt, synthetic construct
  source 1..20: mol_type = other RNA
gtccccttgtccccatctca

SEQ ID NO: 4235 - RNA, 20 nt, synthetic construct
  source 1..20: mol_type = other RNA
tgtgtgatattccttccctc

SEQ ID NO: 4236 - RNA, 20 nt, synthetic construct
  source 1..20: mol_type = other RNA
ctgccctatacccggaggga

SEQ ID NO: 4237 - RNA, 20 nt, synthetic construct
  source 1..20: mol_type = other RNA
cttaaaatccaacagaaaac

SEQ ID NO: 4238 - RNA, 20 nt, synthetic construct
  source 1..20: mol_type = other RNA
acataggaagccaggtgcgg

SEQ ID NO: 4239 - RNA, 20 nt, synthetic construct
  source 1..20: mol_type = other RNA
gtggcagtggaagtgttaag

SEQ ID NO: 4240 - RNA, 20 nt, synthetic construct
  source 1..20: mol_type = other RNA
cccttgcatgccctgagatg

SEQ ID NO: 4241 - RNA, 20 nt, synthetic construct
  source 1..20: mol_type = other RNA
ggtccccttgtccccatctc

SEQ ID NO: 4242 - RNA, 20 nt, synthetic construct
  source 1..20: mol_type = other RNA
ataaatcccgagaggtgggc

SEQ ID NO: 4243 - RNA, 20 nt, synthetic construct
  source 1..20: mol_type = other RNA
tatgagcatttccagtttgg

SEQ ID NO: 4244 - RNA, 20 nt, synthetic construct
  source 1..20: mol_type = other RNA
tatttgtaatacccccaaac

SEQ ID NO: 4245 - RNA, 20 nt, synthetic construct
  source 1..20: mol_type = other RNA
gcccaggagagacagcagtg

SEQ ID NO: 4246 - RNA, 20 nt, synthetic construct
  source 1..20: mol_type = other RNA
tcactttttaaatagcaaag

SEQ ID NO: 4247 - RNA, 20 nt, synthetic construct
  source 1..20: mol_type = other RNA
tctgtgctctgcaaatgacc

SEQ ID NO: 4248 - RNA, 20 nt, synthetic construct
  source 1..20: mol_type = other RNA
aggtcattctgcaaacccca

SEQ ID NO: 4249 - RNA, 20 nt, synthetic construct
  source 1..20: mol_type = other RNA
taggtttgtctataatgtac

SEQ ID NO: 4250 - RNA, 20 nt, synthetic construct
  source 1..20: mol_type = other RNA
accttctcaagtagcaatga

SEQ ID NO: 4251 - RNA, 20 nt, synthetic construct
  source 1..20: mol_type = other RNA
gtatgggtttctataatctg

SEQ ID NO: 4252 - RNA, 20 nt, synthetic construct
  source 1..20: mol_type = other RNA
taccaatctttgtgcatggc

SEQ ID NO: 4253 - RNA, 20 nt, synthetic construct
  source 1..20: mol_type = other RNA
gacgtgcagaaggcgttgag

SEQ ID NO: 4254 - RNA, 20 nt, synthetic construct
  source 1..20: mol_type = other RNA
ctcacttatctcaaggttca

SEQ ID NO: 4255 - RNA, 20 nt, synthetic construct
  source 1..20: mol_type = other RNA
ttcaggagagaaagggtcaa

SEQ ID NO: 4256 - RNA, 20 nt, synthetic construct
  source 1..20: mol_type = other RNA
taggacttcttcgcatcgcg

SEQ ID NO: 4257 - RNA, 20 nt, synthetic construct
  source 1..20: mol_type = other RNA
ctgctcttcgtggacatttc

SEQ ID NO: 4258 - RNA, 20 nt, synthetic construct
  source 1..20: mol_type = other RNA
agaaatagagaaaagaggcc

SEQ ID NO: 4259 - RNA, 20 nt, synthetic construct
  source 1..20: mol_type = other RNA
actggttactcacccgctat

SEQ ID NO: 4260 - RNA, 20 nt, synthetic construct
  source 1..20: mol_type = other RNA
aggacttcttcgcatcgcgg

SEQ ID NO: 4261 - RNA, 20 nt, synthetic construct
  source 1..20: mol_type = other RNA
caacacgaatctgaacaaac

SEQ ID NO: 4262 - RNA, 20 nt, synthetic construct
  source 1..20: mol_type = other RNA
agaagtgatatgcttcaatt

SEQ ID NO: 4263 - RNA, 20 nt, synthetic construct
  source 1..20: mol_type = other RNA
gataatcacttgagctgggg

SEQ ID NO: 4264 - RNA, 20 nt, synthetic construct
  source 1..20: mol_type = other RNA
atatgagcatttccagtttg

SEQ ID NO: 4265 - RNA, 20 nt, synthetic construct
  source 1..20: mol_type = other RNA
cgggataatcacttgagctg

SEQ ID NO: 4266 - RNA, 20 nt, synthetic construct
  source 1..20: mol_type = other RNA
cgggagaatcgtctgattgc

SEQ ID NO: 4267 - RNA, 20 nt, synthetic construct
  source 1..20: mol_type = other RNA
tcaccaaaggagaagcaaca

SEQ ID NO: 4268 - RNA, 20 nt, synthetic construct
  source 1..20: mol_type = other RNA
ggggaggaggatgatctgtt

SEQ ID NO: 4269 - RNA, 20 nt, synthetic construct
  source 1..20: mol_type = other RNA
cgttggatgaaggttcattt

SEQ ID NO: 4270 - RNA, 20 nt, synthetic construct
  source 1..20: mol_type = other RNA
aggtcaattctgcccatagc

SEQ ID NO: 4271 - RNA, 20 nt, synthetic construct
  source 1..20: mol_type = other RNA
atggccagcttcaggaggga

SEQ ID NO: 4272 - RNA, 20 nt, synthetic construct
  source 1..20: mol_type = other RNA
aaatttatttcgtacaatac

SEQ ID NO: 4273 - RNA, 20 nt, synthetic construct
  source 1..20: mol_type = other RNA
gaagagcgcacgatagacgc

SEQ ID NO: 4274 - RNA, 20 nt, synthetic construct
  source 1..20: mol_type = other RNA
ccactgcttctgtccttcag

SEQ ID NO: 4275 - RNA, 20 nt, synthetic construct
  source 1..20: mol_type = other RNA
caaagaaattctatggacgg

SEQ ID NO: 4276 - RNA, 20 nt, synthetic construct
  source 1..20: mol_type = other RNA
aaggatgaggtcgggtgcag

SEQ ID NO: 4277 - RNA, 20 nt, synthetic construct
  source 1..20: mol_type = other RNA
gatcaaagggtatgatctaa

SEQ ID NO: 4278 - RNA, 20 nt, synthetic construct
  source 1..20: mol_type = other RNA
ttttgtgtccactgtaggct

SEQ ID NO: 4279 - RNA, 20 nt, synthetic construct
  source 1..20: mol_type = other RNA
agggaaggaatatcacacag

SEQ ID NO: 4280 - RNA, 20 nt, synthetic construct
  source 1..20: mol_type = other RNA
ctaggacttcttcgcatcgc

SEQ ID NO: 4281 - RNA, 20 nt, synthetic construct
  source 1..20: mol_type = other RNA
accaatctttgtgcatggct

SEQ ID NO: 4282 - RNA, 20 nt, synthetic construct
  source 1..20: mol_type = other RNA
ttggcgacaacatattgtaa

SEQ ID NO: 4283 - RNA, 20 nt, synthetic construct
  source 1..20: mol_type = other RNA
tggccagcttcaggagggag

SEQ ID NO: 4284 - RNA, 20 nt, synthetic construct
  source 1..20: mol_type = other RNA
gggaggaggatgatctgttt

SEQ ID NO: 4285 - RNA, 20 nt, synthetic construct
  source 1..20: mol_type = other RNA
tagggaagccctcactgaga

SEQ ID NO: 4286 - RNA, 20 nt, synthetic construct
  source 1..20: mol_type = other RNA
aaggtcaattctgcccatag

SEQ ID NO: 4287 - RNA, 20 nt, synthetic construct
  source 1..20: mol_type = other RNA
atctaattgtggcacagtga

SEQ ID NO: 4288 - RNA, 20 nt, synthetic construct
  source 1..20: mol_type = other RNA
tactggaggggggcagcgcg

SEQ ID NO: 4289 - RNA, 20 nt, synthetic construct
  source 1..20: mol_type = other RNA
catctaattgtggcacagtg

SEQ ID NO: 4290 - RNA, 20 nt, synthetic construct
  source 1..20: mol_type = other RNA
gctctgaagcacttgaaatg

SEQ ID NO: 4291 - RNA, 20 nt, synthetic construct
  source 1..20: mol_type = other RNA
ctatgtcttataattgagtc

SEQ ID NO: 4292 - RNA, 20 nt, synthetic construct
  source 1..20: mol_type = other RNA
tttatttcgtacaatactgg

SEQ ID NO: 4293 - RNA, 20 nt, synthetic construct
  source 1..20: mol_type = other RNA
aatcccgagaggtgggcagg

SEQ ID NO: 4294 - RNA, 20 nt, synthetic construct
  source 1..20: mol_type = other RNA
gtatagcgccaagcctacag

SEQ ID NO: 4295 - RNA, 20 nt, synthetic construct
  source 1..20: mol_type = other RNA
aaccggaatgctattgacgg

SEQ ID NO: 4296 - RNA, 20 nt, synthetic construct
  source 1..20: mol_type = other RNA
ttgttttgttcaaaatgtct

SEQ ID NO: 4297 - RNA, 20 nt, synthetic construct
  source 1..20: mol_type = other RNA
tctaggacttcttcgcatcg

SEQ ID NO: 4298 - RNA, 20 nt, synthetic construct
  source 1..20: mol_type = other RNA
cctagtttagtctcttggat

SEQ ID NO: 4299 - RNA, 20 nt, synthetic construct
  source 1..20: mol_type = other RNA
tttaaattccaataccacat

SEQ ID NO: 4300 - RNA, 20 nt, synthetic construct
  source 1..20: mol_type = other RNA
agcatcctttgaactttaga

SEQ ID NO: 4301 - RNA, 20 nt, synthetic construct
  source 1..20: mol_type = other RNA
gcgggataatcacttgagct

SEQ ID NO: 4302 - RNA, 20 nt, synthetic construct
  source 1..20: mol_type = other RNA
actctgtaacacacgcctgc

SEQ ID NO: 4303 - RNA, 20 nt, synthetic construct
  source 1..20: mol_type = other RNA
aagcgttttgcgcaggagag

SEQ ID NO: 4304 - RNA, 20 nt, synthetic construct
  source 1..20: mol_type = other RNA
agagctttggccgaggacga

SEQ ID NO: 4305 - RNA, 20 nt, synthetic construct
  source 1..20: mol_type = other RNA
agagacagaaagtcgatccg

SEQ ID NO: 4306 - RNA, 20 nt, synthetic construct
  source 1..20: mol_type = other RNA
ctattaaaaaggatgaggtc

SEQ ID NO: 4307 - RNA, 20 nt, synthetic construct
  source 1..20: mol_type = other RNA
tgaaggacagaagcagtgga

SEQ ID NO: 4308 - RNA, 20 nt, synthetic construct
  source 1..20: mol_type = other RNA
ctgaaggacagaagcagtgg

SEQ ID NO: 4309 - RNA, 20 nt, synthetic construct
  source 1..20: mol_type = other RNA
taccttatttcactgtaatg

SEQ ID NO: 4310 - RNA, 20 nt, synthetic construct
  source 1..20: mol_type = other RNA
aattagacctgcccagttag

SEQ ID NO: 4311 - RNA, 20 nt, synthetic construct
  source 1..20: mol_type = other RNA
ctgatatccactaactgggc

SEQ ID NO: 4312 - RNA, 20 nt, synthetic construct
  source 1..20: mol_type = other RNA
attgctgatatccactaact

SEQ ID NO: 4313 - RNA, 20 nt, synthetic construct
  source 1..20: mol_type = other RNA
caggctgtcaggaggcatga

SEQ ID NO: 4314 - RNA, 20 nt, synthetic construct
  source 1..20: mol_type = other RNA
aaatatcttacttcattact

SEQ ID NO: 4315 - RNA, 20 nt, synthetic construct
  source 1..20: mol_type = other RNA
ttttctggtatgatactatt

SEQ ID NO: 4316 - RNA, 20 nt, synthetic construct
  source 1..20: mol_type = other RNA
ctggtatgatactattaggt

SEQ ID NO: 4317 - RNA, 20 nt, synthetic construct
  source 1..20: mol_type = other RNA
atctcttgatgaacagctac

SEQ ID NO: 4318 - RNA, 20 nt, synthetic construct
  source 1..20: mol_type = other RNA
gatgaacagctacaggcctg

SEQ ID NO: 4319 - RNA, 20 nt, synthetic construct
  source 1..20: mol_type = other RNA
acagctacaggcctgaggtt

SEQ ID NO: 4320 - RNA, 20 nt, synthetic construct
  source 1..20: mol_type = other RNA
ctacatgaactcctaacctc

SEQ ID NO: 4321 - RNA, 20 nt, synthetic construct
  source 1..20: mol_type = other RNA
gtccttcagcctcaacttat

SEQ ID NO: 4322 - RNA, 20 nt, synthetic construct
  source 1..20: mol_type = other RNA
cacctataagttgaggctga

SEQ ID NO: 4323 - RNA, 20 nt, synthetic construct
  source 1..20: mol_type = other RNA
acacagtcacctataagttg

SEQ ID NO: 4324 - RNA, 20 nt, synthetic construct
  source 1..20: mol_type = other RNA
tcgttaactccgcagagcac

SEQ ID NO: 4325 - RNA, 20 nt, synthetic construct
  source 1..20: mol_type = other RNA
cgttaactccgcagagcaca

SEQ ID NO: 4326 - RNA, 20 nt, synthetic construct
  source 1..20: mol_type = other RNA
ggatggtgccctgtgctctg

SEQ ID NO: 4327 - RNA, 20 nt, synthetic construct
  source 1..20: mol_type = other RNA
ctatccccagcacctaaagc

SEQ ID NO: 4328 - RNA, 20 nt, synthetic construct
  source 1..20: mol_type = other RNA
tatccccagcacctaaagct

SEQ ID NO: 4329 - RNA, 20 nt, synthetic construct
  source 1..20: mol_type = other RNA
ggtagggatttaggaaaaag

SEQ ID NO: 4330 - RNA, 20 nt, synthetic construct
  source 1..20: mol_type = other RNA
agggatttaggaaaaagagg

SEQ ID NO: 4331 - RNA, 20 nt, synthetic construct
  source 1..20: mol_type = other RNA
tttaggaaaaagaggaggct

SEQ ID NO: 4332 - RNA, 20 nt, synthetic construct
  source 1..20: mol_type = other RNA
aggaaaaagaggaggcttgg

SEQ ID NO: 4333 - RNA, 20 nt, synthetic construct
  source 1..20: mol_type = other RNA
gatcatctagcacatgtttt

SEQ ID NO: 4334 - RNA, 20 nt, synthetic construct
  source 1..20: mol_type = other RNA
ctagcacatgtttttggttt

SEQ ID NO: 4335 - RNA, 20 nt, synthetic construct
  source 1..20: mol_type = other RNA
tatctggtgggtagctactt

SEQ ID NO: 4336 - RNA, 20 nt, synthetic construct
  source 1..20: mol_type = other RNA
ggtgggtagctacttaggag

SEQ ID NO: 4337 - RNA, 20 nt, synthetic construct
  source 1..20: mol_type = other RNA
cctgcttcctgcttcatccc

SEQ ID NO: 4338 - RNA, 20 nt, synthetic construct
  source 1..20: mol_type = other RNA
gaaggtgccagggatgaagc

SEQ ID NO: 4339 - RNA, 20 nt, synthetic construct
  source 1..20: mol_type = other RNA
ttgccccttccgccatggga

SEQ ID NO: 4340 - RNA, 20 nt, synthetic construct
  source 1..20: mol_type = other RNA
cttgccccttccgccatggg

SEQ ID NO: 4341 - RNA, 20 nt, synthetic construct
  source 1..20: mol_type = other RNA
tagcttgccccttccgccat

SEQ ID NO: 4342 - RNA, 20 nt, synthetic construct
  source 1..20: mol_type = other RNA
ctagcttgccccttccgcca

SEQ ID NO: 4343 - RNA, 20 nt, synthetic construct
  source 1..20: mol_type = other RNA
actaacattcacatcatagc

SEQ ID NO: 4344 - RNA, 20 nt, synthetic construct
  source 1..20: mol_type = other RNA
ctaacattcacatcatagca

SEQ ID NO: 4345 - RNA, 20 nt, synthetic construct
  source 1..20: mol_type = other RNA
tcacatcatagcagggactc

SEQ ID NO: 4346 - RNA, 20 nt, synthetic construct
  source 1..20: mol_type = other RNA
catcatagcagggactctgg

SEQ ID NO: 4347 - RNA, 20 nt, synthetic construct
  source 1..20: mol_type = other RNA
gggagcgccatctttgtagc

SEQ ID NO: 4348 - RNA, 20 nt, synthetic construct
  source 1..20: mol_type = other RNA
tcaagtagcaatgaaggtta

SEQ ID NO: 4349 - RNA, 20 nt, synthetic construct
  source 1..20: mol_type = other RNA
ctcaagtagcaatgaaggtt

SEQ ID NO: 4350 - RNA, 20 nt, synthetic construct
  source 1..20: mol_type = other RNA
ggaagacctgtgcatttttg

SEQ ID NO: 4351 - RNA, 20 nt, synthetic construct
  source 1..20: mol_type = other RNA
aactgtccacaaaaatgcac

SEQ ID NO: 4352 - RNA, 20 nt, synthetic construct
  source 1..20: mol_type = other RNA
atttatttttagcagagaca

SEQ ID NO: 4353 - RNA, 20 nt, synthetic construct
  source 1..20: mol_type = other RNA
ggttggtgcaagagtaactg

SEQ ID NO: 4354 - RNA, 20 nt, synthetic construct
  source 1..20: mol_type = other RNA
atatcggctcactgcaaccc

SEQ ID NO: 4355 - RNA, 20 nt, synthetic construct
  source 1..20: mol_type = other RNA
agccagcatcttctctccct

SEQ ID NO: 4356 - RNA, 20 nt, synthetic construct
  source 1..20: mol_type = other RNA
cacctgtgatccgagctact

SEQ ID NO: 4357 - RNA, 20 nt, synthetic construct
  source 1..20: mol_type = other RNA
tactcgggggaggctgaagc

SEQ ID NO: 4358 - RNA, 20 nt, synthetic construct
  source 1..20: mol_type = other RNA
gaacgaggtggagtttggcc

SEQ ID NO: 4359 - RNA, 20 nt, synthetic construct
  source 1..20: mol_type = other RNA
gcatcactgcacctcagtct

SEQ ID NO: 4360 - RNA, 20 nt, synthetic construct
  source 1..20: mol_type = other RNA
tgggttttgccatattgctc

SEQ ID NO: 4361 - RNA, 20 nt, synthetic construct
  source 1..20: mol_type = other RNA
ctacttaggagtggaattgc

SEQ ID NO: 4362 - RNA, 20 nt, synthetic construct
  source 1..20: mol_type = other RNA
ttcagcctcccccgagtagc

SEQ ID NO: 4363 - RNA, 20 nt, synthetic construct
  source 1..20: mol_type = other RNA
cacttccactgccaccaccc

SEQ ID NO: 4364 - RNA, 20 nt, synthetic construct
  source 1..20: mol_type = other RNA
tgcatcactgcacctcagtc

SEQ ID NO: 4365 - RNA, 20 nt, synthetic construct
  source 1..20: mol_type = other RNA
tccacagccttgtcaacact

SEQ ID NO: 4366 - RNA, 20 nt, synthetic construct
  source 1..20: mol_type = other RNA
ctctgggggagcatacagac

SEQ ID NO: 4367 - RNA, 20 nt, synthetic construct
  source 1..20: mol_type = other RNA
tcccccagaggtttgagcag

SEQ ID NO: 4368 - RNA, 20 nt, synthetic construct
  source 1..20: mol_type = other RNA
agggagagaagatgctggct

SEQ ID NO: 4369 - RNA, 20 nt, synthetic construct
  source 1..20: mol_type = other RNA
tcttagcctaggaagattca

SEQ ID NO: 4370 - RNA, 20 nt, synthetic construct
  source 1..20: mol_type = other RNA
gtatctcagggttcttgcct

SEQ ID NO: 4371 - RNA, 20 nt, synthetic construct
  source 1..20: mol_type = other RNA
ctcaagtggtttgcccgcct

SEQ ID NO: 4372 - RNA, 20 nt, synthetic construct
  source 1..20: mol_type = other RNA
caaaaccagcctgagcaata

SEQ ID NO: 4373 - RNA, 20 nt, synthetic construct
  source 1..20: mol_type = other RNA
tgaggcgggtctatcacctg

SEQ ID NO: 4374 - RNA, 20 nt, synthetic construct
  source 1..20: mol_type = other RNA
tgcccaggggctgggggagg

SEQ ID NO: 4375 - RNA, 20 nt, synthetic construct
  source 1..20: mol_type = other RNA
cagccatgagccactgcgtc

SEQ ID NO: 4376 - RNA, 20 nt, synthetic construct
  source 1..20: mol_type = other RNA
taagatgtggggcctttggg

SEQ ID NO: 4377 - RNA, 20 nt, synthetic construct
  source 1..20: mol_type = other RNA
caaaaagtatctgggcatga

SEQ ID NO: 4378 - RNA, 20 nt, synthetic construct
  source 1..20: mol_type = other RNA
ttaaattaattaaaattggc

SEQ ID NO: 4379 - RNA, 20 nt, synthetic construct
  source 1..20: mol_type = other RNA
tggaagtgagcagagagaga

SEQ ID NO: 4380 - RNA, 20 nt, synthetic construct
  source 1..20: mol_type = other RNA
ccgtctgtatgctcccccag

SEQ ID NO: 4381 - RNA, 20 nt, synthetic construct
  source 1..20: mol_type = other RNA
cagcatttgggcacgaaggc

SEQ ID NO: 4382 - RNA, 20 nt, synthetic construct
  source 1..20: mol_type = other RNA
catgccctgagatggggaca

SEQ ID NO: 4383 - RNA, 20 nt, synthetic construct
  source 1..20: mol_type = other RNA
acttccactgccaccaccct

SEQ ID NO: 4384 - RNA, 20 nt, synthetic construct
  source 1..20: mol_type = other RNA
tttacagctgaggccccagc

SEQ ID NO: 4385 - RNA, 20 nt, synthetic construct
  source 1..20: mol_type = other RNA
atgccctgagatggggacaa

SEQ ID NO: 4386 - RNA, 20 nt, synthetic construct
  source 1..20: mol_type = other RNA
ttgaatgaatgaatgctttg

SEQ ID NO: 4387 - RNA, 20 nt, synthetic construct
  source 1..20: mol_type = other RNA
aatgcagcatttgggcacga

SEQ ID NO: 4388 - RNA, 20 nt, synthetic construct
  source 1..20: mol_type = other RNA
taaaattacaaaaatgatcc

SEQ ID NO: 4389 - RNA, 20 nt, synthetic construct
  source 1..20: mol_type = other RNA
ggaaggagctctcagcagat

SEQ ID NO: 4390 - RNA, 20 nt, synthetic construct
  source 1..20: mol_type = other RNA
aagtatctgggcatgatggc

SEQ ID NO: 4391 - RNA, 20 nt, synthetic construct
  source 1..20: mol_type = other RNA
tgccccgctgctcaaacctc

SEQ ID NO: 4392 - RNA, 20 nt, synthetic construct
  source 1..20: mol_type = other RNA
tgcagctattaaaaaggatg

SEQ ID NO: 4393 - RNA, 20 nt, synthetic construct
  source 1..20: mol_type = other RNA
acgccactgtactcccagcc

SEQ ID NO: 4394 - RNA, 20 nt, synthetic construct
  source 1..20: mol_type = other RNA
tattgtatttcttgtagaga

SEQ ID NO: 4395 - RNA, 20 nt, synthetic construct
  source 1..20: mol_type = other RNA
tgagtctcgctcagtcaccc

SEQ ID NO: 4396 - RNA, 20 nt, synthetic construct
  source 1..20: mol_type = other RNA
ttggcggaagaagacacaag

SEQ ID NO: 4397 - RNA, 20 nt, synthetic construct
  source 1..20: mol_type = other RNA
ccgagctacttggaagactg

SEQ ID NO: 4398 - RNA, 20 nt, synthetic construct
  source 1..20: mol_type = other RNA
aaggagctctcagcagatag

SEQ ID NO: 4399 - RNA, 20 nt, synthetic construct
  source 1..20: mol_type = other RNA
tgaagcacttgaaatgtggc

SEQ ID NO: 4400 - RNA, 20 nt, synthetic construct
  source 1..20: mol_type = other RNA
gaaggagctctcagcagata

SEQ ID NO: 4401 - RNA, 20 nt, synthetic construct
  source 1..20: mol_type = other RNA
ggagggaaggaatatcacac

SEQ ID NO: 4402 - RNA, 20 nt, synthetic construct
  source 1..20: mol_type = other RNA
gagggaaggaatatcacaca

SEQ ID NO: 4403 - RNA, 20 nt, synthetic construct
  source 1..20: mol_type = other RNA
tggccggacgcagtggctca

SEQ ID NO: 4404 - RNA, 20 nt, synthetic construct
  source 1..20: mol_type = other RNA
cgggtctatcacctgaggtc

SEQ ID NO: 4405 - RNA, 20 nt, synthetic construct
  source 1..20: mol_type = other RNA
tggctgtaattctaacactt

SEQ ID NO: 4406 - RNA, 20 nt, synthetic construct
  source 1..20: mol_type = other RNA
ggctgtaattctaacacttt

SEQ ID NO: 4407 - RNA, 20 nt, synthetic construct
  source 1..20: mol_type = other RNA
ggcttgagccctggagttca

SEQ ID NO: 4408 - RNA, 20 nt, synthetic construct
  source 1..20: mol_type = other RNA
cctctgggggagcatacaga

SEQ ID NO: 4409 - RNA, 20 nt, synthetic construct
  source 1..20: mol_type = other RNA
gggggagcatacagacgggc

SEQ ID NO: 4410 - RNA, 20 nt, synthetic construct
  source 1..20: mol_type = other RNA
agggtctcgccatgctgccc

SEQ ID NO: 4411 - RNA, 20 nt, synthetic construct
  source 1..20: mol_type = other RNA
atgagccactgcgtccggcc

SEQ ID NO: 4412 - RNA, 20 nt, synthetic construct
  source 1..20: mol_type = other RNA
gaggagaatcgattgaaccc

SEQ ID NO: 4413 - RNA, 20 nt, synthetic construct
  source 1..20: mol_type = other RNA
caaggcaggagtatcacctg

SEQ ID NO: 4414 - RNA, 20 nt, synthetic construct
  source 1..20: mol_type = other RNA
acaaaaggggccgggcgcgg

SEQ ID NO: 4415 - RNA, 20 nt, synthetic construct
  source 1..20: mol_type = other RNA
aaaaaggatgagttcatgta

SEQ ID NO: 4416 - RNA, 20 nt, synthetic construct
  source 1..20: mol_type = other RNA
ctgtcgtggggtgggggagc

SEQ ID NO: 4417 - RNA, 20 nt, synthetic construct
  source 1..20: mol_type = other RNA
cgccactgtactcccagcct

SEQ ID NO: 4418 - RNA, 20 nt, synthetic construct
  source 1..20: mol_type = other RNA
tgcccaggctgggagtacag

SEQ ID NO: 4419 - RNA, 20 nt, synthetic construct
  source 1..20: mol_type = other RNA
caaaaatacaaaaagtatct

SEQ ID NO: 4420 - RNA, 20 nt, synthetic construct
  source 1..20: mol_type = other RNA
acaaaaatacaaaaagtatc

SEQ ID NO: 4421 - RNA, 20 nt, synthetic construct
  source 1..20: mol_type = other RNA
cgggcaaaccacttgaggtc

SEQ ID NO: 4422 - RNA, 20 nt, synthetic construct
  source 1..20: mol_type = other RNA
ttgtatctttagtagagcca

SEQ ID NO: 4423 - RNA, 20 nt, synthetic construct
  source 1..20: mol_type = other RNA
aataaattagccggatgtgg

SEQ ID NO: 4424 - RNA, 20 nt, synthetic construct
  source 1..20: mol_type = other RNA
gagacagggtttcagcatgc

SEQ ID NO: 4425 - RNA, 20 nt, synthetic construct
  source 1..20: mol_type = other RNA
cccccagaggtttgagcagc

SEQ ID NO: 4426 - RNA, 20 nt, synthetic construct
  source 1..20: mol_type = other RNA
aaaaaaggatgagttcatgt

SEQ ID NO: 4427 - RNA, 20 nt, synthetic construct
  source 1..20: mol_type = other RNA
agcaccactgcactccagtg

SEQ ID NO: 4428 - RNA, 20 nt, synthetic construct
  source 1..20: mol_type = other RNA
caggtgtcctgccctatacc

SEQ ID NO: 4429 - RNA, 20 nt, synthetic construct
  source 1..20: mol_type = other RNA
gcttgtagtcccagctacca

SEQ ID NO: 4430 - RNA, 20 nt, synthetic construct
  source 1..20: mol_type = other RNA
gatgagttcatgtagggaca

SEQ ID NO: 4431 - RNA, 20 nt, synthetic construct
  source 1..20: mol_type = other RNA
ccatgggaggctgaggtgag

SEQ ID NO: 4432 - RNA, 20 nt, synthetic construct
  source 1..20: mol_type = other RNA
tatttatttttagcagagac

SEQ ID NO: 4433 - RNA, 20 nt, synthetic construct
  source 1..20: mol_type = other RNA
tttgtatctttagtagagcc

SEQ ID NO: 4434 - RNA, 20 nt, synthetic construct
  source 1..20: mol_type = other RNA
agacggggtttcaccaggtt

SEQ ID NO: 4435 - RNA, 20 nt, synthetic construct
  source 1..20: mol_type = other RNA
gggcttgcagaatgagtgca

SEQ ID NO: 4436 - RNA, 20 nt, synthetic construct
  source 1..20: mol_type = other RNA
ggcctgcttcagggaagaag

SEQ ID NO: 4437 - RNA, 20 nt, synthetic construct
  source 1..20: mol_type = other RNA
agggtttcagcatgctggcc

SEQ ID NO: 4438 - RNA, 20 nt, synthetic construct
  source 1..20: mol_type = other RNA
tgagaccagcctgcccaacc

SEQ ID NO: 4439 - RNA, 20 nt, synthetic construct
  source 1..20: mol_type = other RNA
caggcatgagctaccccgcc

SEQ ID NO: 4440 - RNA, 20 nt, synthetic construct
  source 1..20: mol_type = other RNA
aaaaaaaaaaaaacaagtct

SEQ ID NO: 4441 - RNA, 20 nt, synthetic construct
  source 1..20: mol_type = other RNA
ataaaataccataaactagg

SEQ ID NO: 4442 - RNA, 20 nt, synthetic construct
  source 1..20: mol_type = other RNA
gccggtaatcccagttactc

SEQ ID NO: 4443 - RNA, 20 nt, synthetic construct
  source 1..20: mol_type = other RNA
tgttaatttttttgtagaga

SEQ ID NO: 4444 - RNA, 20 nt, synthetic construct
  source 1..20: mol_type = other RNA
ctcaaacttctgagctcaag

SEQ ID NO: 4445 - RNA, 20 nt, synthetic construct
  source 1..20: mol_type = other RNA
atactatgcagctattaaaa

SEQ ID NO: 4446 - RNA, 20 nt, synthetic construct
  source 1..20: mol_type = other RNA
agaaaagaggccaggtgcag

SEQ ID NO: 4447 - RNA, 20 nt, synthetic construct
  source 1..20: mol_type = other RNA
gttaatttttttgtagagac

SEQ ID NO: 4448 - RNA, 20 nt, synthetic construct
  source 1..20: mol_type = other RNA
cttcaggaggccaaggccag

SEQ ID NO: 4449 - RNA, 20 nt, synthetic construct
  source 1..20: mol_type = other RNA
caaaaatgatccgggcgtgg

SEQ ID NO: 4450 - RNA, 20 nt, synthetic construct
  source 1..20: mol_type = other RNA
gcacaggatgggggcgtggt

SEQ ID NO: 4451 - RNA, 20 nt, synthetic construct
  source 1..20: mol_type = other RNA
ggtctggaactctcgacctc

SEQ ID NO: 4452 - RNA, 20 nt, synthetic construct
  source 1..20: mol_type = other RNA
tgccaaatagttttccaaag

SEQ ID NO: 4453 - RNA, 20 nt, synthetic construct
  source 1..20: mol_type = other RNA
cctgtcacatgagggtcttc

SEQ ID NO: 4454 - RNA, 20 nt, synthetic construct
  source 1..20: mol_type = other RNA
cctctaatcccagctactcg

SEQ ID NO: 4455 - RNA, 20 nt, synthetic construct
  source 1..20: mol_type = other RNA
ggctgggaagtccacgatca

SEQ ID NO: 4456 - RNA, 20 nt, synthetic construct
  source 1..20: mol_type = other RNA
cctgaagaccctcatgtgac

SEQ ID NO: 4457 - RNA, 20 nt, synthetic construct
  source 1..20: mol_type = other RNA
cggaagaagacacaagtggc

SEQ ID NO: 4458 - RNA, 20 nt, synthetic construct
  source 1..20: mol_type = other RNA
gcaggacacctgtcacatga

SEQ ID NO: 4459 - RNA, 20 nt, synthetic construct
  source 1..20: mol_type = other RNA
tgtcacatgagggtcttcag

SEQ ID NO: 4460 - RNA, 20 nt, synthetic construct
  source 1..20: mol_type = other RNA
cagcagataggggagccaga

SEQ ID NO: 4461 - RNA, 20 nt, synthetic construct
  source 1..20: mol_type = other RNA
gggttttcaccatgtttccc

SEQ ID NO: 4462 - RNA, 20 nt, synthetic construct
  source 1..20: mol_type = other RNA
ccccgagtagctgggattag

SEQ ID NO: 4463 - RNA, 20 nt, synthetic construct
  source 1..20: mol_type = other RNA
cacttgagctggggaggcgg

SEQ ID NO: 4464 - RNA, 20 nt, synthetic construct
  source 1..20: mol_type = other RNA
atcaaggtgccagcagattt

SEQ ID NO: 4465 - RNA, 20 nt, synthetic construct
  source 1..20: mol_type = other RNA
ctgtcacatgagggtcttca

SEQ ID NO: 4466 - RNA, 20 nt, synthetic construct
  source 1..20: mol_type = other RNA
gtccgtgggcacaggcctgg

SEQ ID NO: 4467 - RNA, 20 nt, synthetic construct
  source 1..20: mol_type = other RNA
ggcaggacacctgtcacatg

SEQ ID NO: 4468 - RNA, 20 nt, synthetic construct
  source 1..20: mol_type = other RNA
agcagataggggagccagaa

SEQ ID NO: 4469 - RNA, 20 nt, synthetic construct
  source 1..20: mol_type = other RNA
cgcttgtgtgtctgcctgct

SEQ ID NO: 4470 - RNA, 20 nt, synthetic construct
  source 1..20: mol_type = other RNA
ccggcatgcgccaccatgcc

SEQ ID NO: 4471 - RNA, 20 nt, synthetic construct
  source 1..20: mol_type = other RNA
ccagaccagcctggccaagg

SEQ ID NO: 4472 - RNA, 20 nt, synthetic construct
  source 1..20: mol_type = other RNA
cgtgggcacaggcctggggg

SEQ ID NO: 4473 - RNA, 20 nt, synthetic construct
  source 1..20: mol_type = other RNA
agaaaactgcagaagcagga

SEQ ID NO: 4474 - RNA, 20 nt, synthetic construct
  source 1..20: mol_type = other RNA
ctctaatcccagctactcgg

SEQ ID NO: 4475 - RNA, 20 nt, synthetic construct
  source 1..20: mol_type = other RNA
ggatgggggcgtggtgggcc

SEQ ID NO: 4476 - RNA, 20 nt, synthetic construct
  source 1..20: mol_type = other RNA
ctcaggtgatactcctgcct

SEQ ID NO: 4477 - RNA, 20 nt, synthetic construct
  source 1..20: mol_type = other RNA
ccaccttggccaggctggtc

SEQ ID NO: 4478 - RNA, 20 nt, synthetic construct
  source 1..20: mol_type = other RNA
gtcttgggaaatgcagcatt

SEQ ID NO: 4479 - RNA, 20 nt, synthetic construct
  source 1..20: mol_type = other RNA
ccaggcatggtggcgcatgc

SEQ ID NO: 4480 - RNA, 20 nt, synthetic construct
  source 1..20: mol_type = other RNA
cggaagaatcagatcacacg

SEQ ID NO: 4481 - RNA, 20 nt, synthetic construct
  source 1..20: mol_type = other RNA
ggggtttcaccaggttgggc

SEQ ID NO: 4482 - RNA, 20 nt, synthetic construct
  source 1..20: mol_type = other RNA
tcactgatggacgtttgggt

SEQ ID NO: 4483 - RNA, 20 nt, synthetic construct
  source 1..20: mol_type = other RNA
aacgtccatcagtgatagac

SEQ ID NO: 4484 - RNA, 20 nt, synthetic construct
  source 1..20: mol_type = other RNA
tctatcactgatggacgttt

SEQ ID NO: 4485 - RNA, 20 nt, synthetic construct
  source 1..20: mol_type = other RNA
gatgggggcgtggtgggcca

SEQ ID NO: 4486 - RNA, 20 nt, synthetic construct
  source 1..20: mol_type = other RNA
gcgaggaacatcacacactg

SEQ ID NO: 4487 - RNA, 20 nt, synthetic construct
  source 1..20: mol_type = other RNA
aatcacttgagctggggagg

SEQ ID NO: 4488 - RNA, 20 nt, synthetic construct
  source 1..20: mol_type = other RNA
caggagtatcacctgaggtc

SEQ ID NO: 4489 - RNA, 20 nt, synthetic construct
  source 1..20: mol_type = other RNA
gtggggtgggggagcgggga

SEQ ID NO: 4490 - RNA, 20 nt, synthetic construct
  source 1..20: mol_type = other RNA
tttcaccaggttgggcaggc

SEQ ID NO: 4491 - RNA, 20 nt, synthetic construct
  source 1..20: mol_type = other RNA
tcttgggaaatgcagcattt

SEQ ID NO: 4492 - RNA, 20 nt, synthetic construct
  source 1..20: mol_type = other RNA
gttccagaccagcctggcca

SEQ ID NO: 4493 - RNA, 20 nt, synthetic construct
  source 1..20: mol_type = other RNA
tctcgccatgctgcccaggc

SEQ ID NO: 4494 - RNA, 20 nt, synthetic construct
  source 1..20: mol_type = other RNA
tttcagcatgctggccaggc

SEQ ID NO: 4495 - RNA, 20 nt, synthetic construct
  source 1..20: mol_type = other RNA
gggggcgtggtgggccaggg

SEQ ID NO: 4496 - RNA, 20 nt, synthetic construct
  source 1..20: mol_type = other RNA
gtctatcactgatggacgtt

SEQ ID NO: 4497 - RNA, 20 nt, synthetic construct
  source 1..20: mol_type = other RNA
taacacaagccgcctacaga

SEQ ID NO: 4498 - RNA, 20 nt, synthetic construct
  source 1..20: mol_type = other RNA
aatagctgcatagtattcca

SEQ ID NO: 4499 - RNA, 20 nt, synthetic construct
  source 1..20: mol_type = other RNA
tcctgcctcaggctcccgag

SEQ ID NO: 4500 - RNA, 20 nt, synthetic construct
  source 1..20: mol_type = other RNA
ctagcaggcagacacacaag

SEQ ID NO: 4501 - RNA, 20 nt, synthetic construct
  source 1..20: mol_type = other RNA
gccactcgggagcctgaggc

SEQ ID NO: 4502 - RNA, 20 nt, synthetic construct
  source 1..20: mol_type = other RNA
aggtccgtgggcacaggcct

SEQ ID NO: 4503 - RNA, 20 nt, synthetic construct
  source 1..20: mol_type = other RNA
gcctcaggctcccgagtggc

SEQ ID NO: 4504 - RNA, 20 nt, synthetic construct
  source 1..20: mol_type = other RNA
cccagccactcgggagcctg

SEQ ID NO: 4505 - RNA, 20 nt, synthetic construct
  source 1..20: mol_type = other RNA
tgtagagacggggtttcacc

SEQ ID NO: 4506 - RNA, 20 nt, synthetic construct
  source 1..20: mol_type = other RNA
actgccactgtactccagcc

SEQ ID NO: 4507 - RNA, 20 nt, synthetic construct
  source 1..20: mol_type = other RNA
tctcaaacttctgagctcaa

SEQ ID NO: 4508 - RNA, 20 nt, synthetic construct
  source 1..20: mol_type = other RNA
gtctcaaacttctgagctca

SEQ ID NO: 4509 - RNA, 20 nt, synthetic construct
  source 1..20: mol_type = other RNA
cctcaggctcccgagtggct

SEQ ID NO: 4510 - RNA, 20 nt, synthetic construct
  source 1..20: mol_type = other RNA
aggcctgtgcccacggacct

SEQ ID NO: 4511 - RNA, 20 nt, synthetic construct
  source 1..20: mol_type = other RNA
acctgtaatcccagccacct

SEQ ID NO: 4512 - RNA, 20 nt, synthetic construct
  source 1..20: mol_type = other RNA
agagtctcgctgtgttgctc

SEQ ID NO: 4513 - RNA, 20 nt, synthetic construct
  source 1..20: mol_type = other RNA
taggtccgtgggcacaggcc

SEQ ID NO: 4514 - RNA, 20 nt, synthetic construct
  source 1..20: mol_type = other RNA
cacccccaggcctgtgccca

SEQ ID NO: 4515 - RNA, 20 nt, synthetic construct
  source 1..20: mol_type = other RNA
tcagcctcccccgagtagct

SEQ ID NO: 4516 - RNA, 20 nt, synthetic construct
  source 1..20: mol_type = other RNA
ggcacaggatgggggcgtgg

SEQ ID NO: 4517 - RNA, 20 nt, synthetic construct
  source 1..20: mol_type = other RNA
gcttgtgtgtctgcctgcta

SEQ ID NO: 4518 - RNA, 20 nt, synthetic construct
  source 1..20: mol_type = other RNA
cctctcacctcagcctccca

SEQ ID NO: 4519 - RNA, 20 nt, synthetic construct
  source 1..20: mol_type = other RNA
ataataaaataccataaact

SEQ ID NO: 4520 - RNA, 20 nt, synthetic construct
  source 1..20: mol_type = other RNA
cacctgtaatcccagccacc

SEQ ID NO: 4521 - RNA, 20 nt, synthetic construct
  source 1..20: mol_type = other RNA
cgtctgtaatcccagccact

SEQ ID NO: 4522 - RNA, 20 nt, synthetic construct
  source 1..20: mol_type = other RNA
aggagaatcacttgaaaccc

SEQ ID NO: 4523 - RNA, 20 nt, synthetic construct
  source 1..20: mol_type = other RNA
taatcccagctactcggggg

SEQ ID NO: 4524 - RNA, 20 nt, synthetic construct
  source 1..20: mol_type = other RNA
gggattacagccaccatgcc

SEQ ID NO: 4525 - RNA, 20 nt, synthetic construct
  source 1..20: mol_type = other RNA
ctggaactcctgacctcaag

SEQ ID NO: 4526 - RNA, 20 nt, synthetic construct
  source 1..20: mol_type = other RNA
tacttaggagtggaattgct

SEQ ID NO: 4527 - RNA, 20 nt, synthetic construct
  source 1..20: mol_type = other RNA
ggtccgtgggcacaggcctg

SEQ ID NO: 4528 - RNA, 20 nt, synthetic construct
  source 1..20: mol_type = other RNA
gagccaccatgcccggccca

SEQ ID NO: 4529 - RNA, 20 nt, synthetic construct
  source 1..20: mol_type = other RNA
cttactcttgtcgcccaggc

SEQ ID NO: 4530 - RNA, 20 nt, synthetic construct
  source 1..20: mol_type = other RNA
cctgtcgtggggtgggggag

SEQ ID NO: 4531 - RNA, 20 nt, synthetic construct
  source 1..20: mol_type = other RNA
aggaggtcgaggctgcagtg

SEQ ID NO: 4532 - RNA, 20 nt, synthetic construct
  source 1..20: mol_type = other RNA
ggaagaatcagatcacacgt

SEQ ID NO: 4533 - RNA, 20 nt, synthetic construct
  source 1..20: mol_type = other RNA
atacagacgggcaggctgtg

SEQ ID NO: 4534 - RNA, 20 nt, synthetic construct
  source 1..20: mol_type = other RNA
gagtggaattgctgggtcat

SEQ ID NO: 4535 - RNA, 20 nt, synthetic construct
  source 1..20: mol_type = other RNA
gcctgtcatcccagctacta

SEQ ID NO: 4536 - RNA, 20 nt, synthetic construct
  source 1..20: mol_type = other RNA
tttataagccacctagttta

SEQ ID NO: 4537 - RNA, 20 nt, synthetic construct
  source 1..20: mol_type = other RNA
gcatacagacgggcaggctg

SEQ ID NO: 4538 - RNA, 20 nt, synthetic construct
  source 1..20: mol_type = other RNA
tggtgggccagggtggtctt

SEQ ID NO: 4539 - RNA, 20 nt, synthetic construct
  source 1..20: mol_type = other RNA
tcactctgtcacccagactg

SEQ ID NO: 4540 - RNA, 20 nt, synthetic construct
  source 1..20: mol_type = other RNA
catacagacgggcaggctgt

SEQ ID NO: 4541 - RNA, 20 nt, synthetic construct
  source 1..20: mol_type = other RNA
aactgaacaatgaaaacact

SEQ ID NO: 4542 - RNA, 20 nt, synthetic construct
  source 1..20: mol_type = other RNA
cttactctgttgcccaggct

SEQ ID NO: 4543 - RNA, 20 nt, synthetic construct
  source 1..20: mol_type = other RNA
ggttttgaactcctgacctt

SEQ ID NO: 4544 - RNA, 20 nt, synthetic construct
  source 1..20: mol_type = other RNA
gtggtgggccagggtggtct

SEQ ID NO: 4545 - RNA, 20 nt, synthetic construct
  source 1..20: mol_type = other RNA
caggtgtgcaccaccatggc

SEQ ID NO: 4546 - RNA, 20 nt, synthetic construct
  source 1..20: mol_type = other RNA
tccctagtagctgggatgac

SEQ ID NO: 4547 - RNA, 20 nt, synthetic construct
  source 1..20: mol_type = other RNA
ttttgccatattgctcaggc

SEQ ID NO: 4548 - RNA, 20 nt, synthetic construct
  source 1..20: mol_type = other RNA
acttggaagactgaggtggg

SEQ ID NO: 4549 - RNA, 20 nt, synthetic construct
  source 1..20: mol_type = other RNA
ctcagcactttgggagggcg

SEQ ID NO: 4550 - RNA, 20 nt, synthetic construct
  source 1..20: mol_type = other RNA
gtgtctgcctgctagggtct

SEQ ID NO: 4551 - RNA, 20 nt, synthetic construct
  source 1..20: mol_type = other RNA
tgtcatcccagctactaggg

SEQ ID NO: 4552 - RNA, 20 nt, synthetic construct
  source 1..20: mol_type = other RNA
tgtgcccacggacctaggtg

SEQ ID NO: 4553 - RNA, 20 nt, synthetic construct
  source 1..20: mol_type = other RNA
gctacttggaagactgaggt

SEQ ID NO: 4554 - RNA, 20 nt, synthetic construct
  source 1..20: mol_type = other RNA
gccccgctgctcaaacctct

SEQ ID NO: 4555 - RNA, 20 nt, synthetic construct
  source 1..20: mol_type = other RNA
tctaacactttgggaggctg

SEQ ID NO: 4556 - RNA, 20 nt, synthetic construct
  source 1..20: mol_type = other RNA
tcacctaggtccgtgggcac

SEQ ID NO: 4557 - RNA, 20 nt, synthetic construct
  source 1..20: mol_type = other RNA
tcccaggtggctgggattac

SEQ ID NO: 4558 - RNA, 20 nt, synthetic construct
  source 1..20: mol_type = other RNA
agctacttggaagactgagg

SEQ ID NO: 4559 - RNA, 20 nt, synthetic construct
  source 1..20: mol_type = other RNA
caggccgatcacttgaggtc

SEQ ID NO: 4560 - RNA, 20 nt, synthetic construct
  source 1..20: mol_type = other RNA
cagacgtgtgccaccacgcc

SEQ ID NO: 4561 - RNA, 20 nt, synthetic construct
  source 1..20: mol_type = other RNA
gtctcaaattcctgggctca

SEQ ID NO: 4562 - RNA, 20 nt, synthetic construct
  source 1..20: mol_type = other RNA
actacaggtgtgcaccacca

SEQ ID NO: 4563 - RNA, 20 nt, synthetic construct
  source 1..20: mol_type = other RNA
gagacagggtttcaccacct

SEQ ID NO: 4564 - RNA, 20 nt, synthetic construct
  source 1..20: mol_type = other RNA
tgtaatcccagccacctggg

SEQ ID NO: 4565 - RNA, 20 nt, synthetic construct
  source 1..20: mol_type = other RNA
gactgtaatcccagcacttc

SEQ ID NO: 4566 - RNA, 20 nt, synthetic construct
  source 1..20: mol_type = other RNA
ctcaagcaatcctctggcct

SEQ ID NO: 4567 - RNA, 20 nt, synthetic construct
  source 1..20: mol_type = other RNA
tctcaaattcctgggctcaa

SEQ ID NO: 4568 - RNA, 20 nt, synthetic construct
  source 1..20: mol_type = other RNA
agggtttcaccaccttggcc

SEQ ID NO: 4569 - RNA, 20 nt, synthetic construct
  source 1..20: mol_type = other RNA
caggcgtgagcccctgcacc

SEQ ID NO: 4570 - RNA, 20 nt, synthetic construct
  source 1..20: mol_type = other RNA
ttgctcagggtggagtgcag

SEQ ID NO: 4571 - RNA, 20 nt, synthetic construct
  source 1..20: mol_type = other RNA
ataggcacaggatgggggcg

SEQ ID NO: 4572 - RNA, 20 nt, synthetic construct
  source 1..20: mol_type = other RNA
cactgcagccttgaactcca

SEQ ID NO: 4573 - RNA, 20 nt, synthetic construct
  source 1..20: mol_type = other RNA
gctactagggaggctgaggg

SEQ ID NO: 4574 - RNA, 20 nt, synthetic construct
  source 1..20: mol_type = other RNA
caggcacgcaccaccacatc

SEQ ID NO: 4575 - RNA, 20 nt, synthetic construct
  source 1..20: mol_type = other RNA
gccacctgggaggctgaggc

SEQ ID NO: 4576 - RNA, 20 nt, synthetic construct
  source 1..20: mol_type = other RNA
gaagactgcttgagcccagg

SEQ ID NO: 4577 - RNA, 20 nt, synthetic construct
  source 1..20: mol_type = other RNA
tcctgcctcagcctcccagg

SEQ ID NO: 4578 - RNA, 20 nt, synthetic construct
  source 1..20: mol_type = other RNA
taaataaataaaaattagcc

SEQ ID NO: 4579 - RNA, 20 nt, synthetic construct
  source 1..20: mol_type = other RNA
ttaatttttttgtagagacg

SEQ ID NO: 4580 - RNA, 20 nt, synthetic construct
  source 1..20: mol_type = other RNA
gcctcagcctcccaggtggc

SEQ ID NO: 4581 - RNA, 20 nt, synthetic construct
  source 1..20: mol_type = other RNA
ccctcagcctccctagtagc

SEQ ID NO: 4582 - RNA, 20 nt, synthetic construct
  source 1..20: mol_type = other RNA
aaaaaaaaaaaaaaagacat

SEQ ID NO: 4583 - RNA, 20 nt, synthetic construct
  source 1..20: mol_type = other RNA
aaaaaaaaagccaggcacag

SEQ ID NO: 4584 - RNA, 20 nt, synthetic construct
  source 1..20: mol_type = other RNA
cctgtcctcacctaggtccg

SEQ ID NO: 4585 - RNA, 20 nt, synthetic construct
  source 1..20: mol_type = other RNA
aacccgggagatggaggttg

SEQ ID NO: 4586 - RNA, 20 nt, synthetic construct
  source 1..20: mol_type = other RNA
gtctgtaatcccagccactc

SEQ ID NO: 4587 - RNA, 20 nt, synthetic construct
  source 1..20: mol_type = other RNA
gggtttcaacatatgaattt

SEQ ID NO: 4588 - RNA, 20 nt, synthetic construct
  source 1..20: mol_type = other RNA
ctgtcctcacctaggtccgt

SEQ ID NO: 4589 - RNA, 20 nt, synthetic construct
  source 1..20: mol_type = other RNA
ccacggacctaggtgaggac

SEQ ID NO: 4590 - RNA, 20 nt, synthetic construct
  source 1..20: mol_type = other RNA
tcttgctctgtcacccacac

SEQ ID NO: 4591 - RNA, 20 nt, synthetic construct
  source 1..20: mol_type = other RNA
tcttaagtagctgggactac

SEQ ID NO: 4592 - RNA, 20 nt, synthetic construct
  source 1..20: mol_type = other RNA
tcaccacaacctccatctcc

SEQ ID NO: 4593 - RNA, 20 nt, synthetic construct
  source 1..20: mol_type = other RNA
ccagctactagggaggctga

SEQ ID NO: 4594 - RNA, 20 nt, synthetic construct
  source 1..20: mol_type = other RNA
aggagtgcctgtcctcacct

SEQ ID NO: 4595 - RNA, 20 nt, synthetic construct
  source 1..20: mol_type = other RNA
caccacaacctccatctccc

SEQ ID NO: 4596 - RNA, 20 nt, synthetic construct
  source 1..20: mol_type = other RNA
gttactcaggaagctgaggc

SEQ ID NO: 4597 - RNA, 20 nt, synthetic construct
  source 1..20: mol_type = other RNA
tgtagtcccagctacttaag

SEQ ID NO: 4598 - RNA, 20 nt, synthetic construct
  source 1..20: mol_type = other RNA
ccagaggattgcttgagccc

SEQ ID NO: 4599 - RNA, 20 nt, synthetic construct
  source 1..20: mol_type = other RNA
ggcttgagcctgggaggttg

SEQ ID NO: 4600 - RNA, 20 nt, synthetic construct
  source 1..20: mol_type = other RNA
gatcaaggtgccagcagatt

SEQ ID NO: 4601 - RNA, 20 nt, synthetic construct
  source 1..20: mol_type = other RNA
cctcagcctcccaggtggct

SEQ ID NO: 4602 - RNA, 20 nt, synthetic construct
  source 1..20: mol_type = other RNA
gggaggctgaggtgagagga

SEQ ID NO: 4603 - RNA, 20 nt, synthetic construct
  source 1..20: mol_type = other RNA
cccagccacctgggaggctg

SEQ ID NO: 4604 - RNA, 20 nt, synthetic construct
  source 1..20: mol_type = other RNA
acaggtgcagcacaccaaca

SEQ ID NO: 4605 - RNA, 20 nt, synthetic construct
  source 1..20: mol_type = other RNA
gcaccactgcactccagtgt

SEQ ID NO: 4606 - RNA, 20 nt, synthetic construct
  source 1..20: mol_type = other RNA
gcctcagcttcctgagtaac

SEQ ID NO: 4607 - RNA, 20 nt, synthetic construct
  source 1..20: mol_type = other RNA
tgagaggatggcttgagccc

SEQ ID NO: 4608 - RNA, 20 nt, synthetic construct
  source 1..20: mol_type = other RNA
tgtaattctaacactttggg

SEQ ID NO: 4609 - RNA, 20 nt, synthetic construct
  source 1..20: mol_type = other RNA
cctgggctcaagcaatcctc

SEQ ID NO: 4610 - RNA, 20 nt, synthetic construct
  source 1..20: mol_type = other RNA
gagccagggtttcaccatgt

SEQ ID NO: 4611 - RNA, 20 nt, synthetic construct
  source 1..20: mol_type = other RNA
gagaatcgattgaacccagg

SEQ ID NO: 4612 - RNA, 20 nt, synthetic construct
  source 1..20: mol_type = other RNA
ggtttcaacatatgaatttt

SEQ ID NO: 4613 - RNA, 20 nt, synthetic construct
  source 1..20: mol_type = other RNA
ggagtgcagtggtgcaatat

SEQ ID NO: 4614 - RNA, 20 nt, synthetic construct
  source 1..20: mol_type = other RNA
atacaaaaattagccggcca

SEQ ID NO: 4615 - RNA, 20 nt, synthetic construct
  source 1..20: mol_type = other RNA
cccagttactcaggaagctg

SEQ ID NO: 4616 - RNA, 20 nt, synthetic construct
  source 1..20: mol_type = other RNA
caaaaattagccggccatgg

SEQ ID NO: 4617 - RNA, 20 nt, synthetic construct
  source 1..20: mol_type = other RNA
aaataaaaattagccaggtg

SEQ ID NO: 4618 - RNA, 20 nt, synthetic construct
  source 1..20: mol_type = other RNA
caggtgcataccaccacacc

SEQ ID NO: 4619 - RNA, 20 nt, synthetic construct
  source 1..20: mol_type = other RNA
gcactttgggaagctgagac

SEQ ID NO: 4620 - RNA, 20 nt, synthetic construct
  source 1..20: mol_type = other RNA
cctcagcttcctgagtaact

SEQ ID NO: 4621 - RNA, 20 nt, synthetic construct
  source 1..20: mol_type = other RNA
ctttgggagggcgaggtggg

SEQ ID NO: 4622 - RNA, 20 nt, synthetic construct
  source 1..20: mol_type = other RNA
gctacttaagaggctgaggc

SEQ ID NO: 4623 - RNA, 20 nt, synthetic construct
  source 1..20: mol_type = other RNA
tgggaagactgcttgagccc

SEQ ID NO: 4624 - RNA, 20 nt, synthetic construct
  source 1..20: mol_type = other RNA
gtttcaacatatgaattttg

SEQ ID NO: 4625 - RNA, 20 nt, synthetic construct
  source 1..20: mol_type = other RNA
gcctcagcctcttaagtagc

SEQ ID NO: 4626 - RNA, 20 nt, synthetic construct
  source 1..20: mol_type = other RNA
caaggcaggtggatcaccta

SEQ ID NO: 4627 - RNA, 20 nt, synthetic construct
  source 1..20: mol_type = other RNA
ttcaacatatgaattttggg

SEQ ID NO: 4628 - RNA, 20 nt, synthetic construct
  source 1..20: mol_type = other RNA
ctgccactgtactccagcct

SEQ ID NO: 4629 - RNA, 20 nt, synthetic construct
  source 1..20: mol_type = other RNA
ttgtgttttttgtagagaca

SEQ ID NO: 4630 - RNA, 20 nt, synthetic construct
  source 1..20: mol_type = other RNA
tttcaccaccttggccaggc

SEQ ID NO: 4631 - RNA, 20 nt, synthetic construct
  source 1..20: mol_type = other RNA
tctcgctcagtcacccaggc

SEQ ID NO: 4632 - RNA, 20 nt, synthetic construct
  source 1..20: mol_type = other RNA
tgcatttcccaagaccaccc

SEQ ID NO: 4633 - RNA, 20 nt, synthetic construct
  source 1..20: mol_type = other RNA
tctttctttcttttttgaga

SEQ ID NO: 4634 - RNA, 20 nt, synthetic construct
  source 1..20: mol_type = other RNA
cctcagtcttccaagtagct

SEQ ID NO: 4635 - RNA, 20 nt, synthetic construct
  source 1..20: mol_type = other RNA
ctttgggaggacaaggcagg

SEQ ID NO: 4636 - RNA, 20 nt, synthetic construct
  source 1..20: mol_type = other RNA
gagtgcaaggttttattgag

SEQ ID NO: 4637 - RNA, 20 nt, synthetic construct
  source 1..20: mol_type = other RNA
gtaatctcagcactttggga

SEQ ID NO: 4638 - RNA, 20 nt, synthetic construct
  source 1..20: mol_type = other RNA
caaacattagccaggcatgg

SEQ ID NO: 4639 - RNA, 20 nt, synthetic construct
  source 1..20: mol_type = other RNA
tgagaccagcctgggcagca

SEQ ID NO: 4640 - RNA, 20 nt, synthetic construct
  source 1..20: mol_type = other RNA
atacaaacattagccaggca

SEQ ID NO: 4641 - RNA, 20 nt, synthetic construct
  source 1..20: mol_type = other RNA
tattattattattttgagac

SEQ ID NO: 4642 - RNA, 20 nt, synthetic construct
  source 1..20: mol_type = other RNA
cccagctacttaagaggctg

SEQ ID NO: 4643 - RNA, 20 nt, synthetic construct
  source 1..20: mol_type = other RNA
tcacccacactggagtgcag

SEQ ID NO: 4644 - RNA, 20 nt, synthetic construct
  source 1..20: mol_type = other RNA
gcactttgggagggcgaggt

SEQ ID NO: 4645 - RNA, 20 nt, synthetic construct
  source 1..20: mol_type = other RNA
gagacagggttttgctatgt

SEQ ID NO: 4646 - RNA, 20 nt, synthetic construct
  source 1..20: mol_type = other RNA
cctcagcctcttaagtagct

SEQ ID NO: 4647 - RNA, 20 nt, synthetic construct
  source 1..20: mol_type = other RNA
agggttttgctatgttggcc

SEQ ID NO: 4648 - RNA, 20 nt, synthetic construct
  source 1..20: mol_type = other RNA
tttgtgttttttgtagagac

SEQ ID NO: 4649 - RNA, 20 nt, synthetic construct
  source 1..20: mol_type = other RNA
tttcaacatatgaattttgg

SEQ ID NO: 4650 - RNA, 20 nt, synthetic construct
  source 1..20: mol_type = other RNA
ggggcctttgggaggtgatt

SEQ ID NO: 4651 - RNA, 20 nt, synthetic construct
  source 1..20: mol_type = other RNA
agtggaattgctgggtcata

SEQ ID NO: 4652 - RNA, 20 nt, synthetic construct
  source 1..20: mol_type = other RNA
cactgtagcctcaacctccc

SEQ ID NO: 4653 - RNA, 20 nt, synthetic construct
  source 1..20: mol_type = other RNA
caaaaaacacaaaaattagc

SEQ ID NO: 4654 - RNA, 20 nt, synthetic construct
  source 1..20: mol_type = other RNA
ggagtacaatggcgcgatct

SEQ ID NO: 4655 - RNA, 20 nt, synthetic construct
  source 1..20: mol_type = other RNA
ttttttttttcttttgagac

SEQ ID NO: 4656 - RNA, 20 nt, synthetic construct
  source 1..20: mol_type = other RNA
tggccaacatggtgaaaccc

SEQ ID NO: 4657 - RNA, 20 nt, synthetic construct
  source 1..20: mol_type = other RNA
cgcttgaacccggaaggcag

SEQ ID NO: 4658 - RNA, 20 nt, synthetic construct
  source 1..20: mol_type = other RNA
gagacggggtttcaccaggt

SEQ ID NO: 4659 - RNA, 20 nt, synthetic construct
  source 1..20: mol_type = other RNA
tggggcctgtcgtggggtgg

SEQ ID NO: 4660 - RNA, 20 nt, synthetic construct
  source 1..20: mol_type = other RNA
tctcagcttcccaaagtgct

SEQ ID NO: 4661 - RNA, 20 nt, synthetic construct
  source 1..20: mol_type = other RNA
ctggggcctgtcgtggggtg

SEQ ID NO: 4662 - RNA, 20 nt, synthetic construct
  source 1..20: mol_type = other RNA
cgtttgaacctgggaggcgg

SEQ ID NO: 4663 - RNA, 20 nt, synthetic construct
  source 1..20: mol_type = other RNA
cactggggcctgtcgtgggg

SEQ ID NO: 4664 - RNA, 20 nt, synthetic construct
  source 1..20: mol_type = other RNA
aactcctgacctcaagtgat

SEQ ID NO: 4665 - RNA, 20 nt, synthetic construct
  source 1..20: mol_type = other RNA
caggctggtcttgagctcct

SEQ ID NO: 4666 - RNA, 20 nt, synthetic construct
  source 1..20: mol_type = other RNA
cgcgccattgtactccagcc

SEQ ID NO: 4667 - RNA, 20 nt, synthetic construct
  source 1..20: mol_type = other RNA
cgcttgaacccgggagatgg

SEQ ID NO: 4668 - RNA, 20 nt, synthetic construct
  source 1..20: mol_type = other RNA
agagtcttactctgtcgccc

SEQ ID NO: 4669 - RNA, 20 nt, synthetic construct
  source 1..20: mol_type = other RNA
aagaggctgaggcaggagaa

SEQ ID NO: 4670 - RNA, 20 nt, synthetic construct
  source 1..20: mol_type = other RNA
aaaaaacacaaaaattagct

SEQ ID NO: 4671 - RNA, 20 nt, synthetic construct
  source 1..20: mol_type = other RNA
actggggcctgtcgtggggt

SEQ ID NO: 4672 - RNA, 20 nt, synthetic construct
  source 1..20: mol_type = other RNA
gcactttgggaggacaaggc

SEQ ID NO: 4673 - RNA, 20 nt, synthetic construct
  source 1..20: mol_type = other RNA
gccttggcctcctgaagtgc

SEQ ID NO: 4674 - RNA, 20 nt, synthetic construct
  source 1..20: mol_type = other RNA
gccttgtcctcccaaagtgc

SEQ ID NO: 4675 - RNA, 20 nt, synthetic construct
  source 1..20: mol_type = other RNA
agcactttgggagggcgagg

SEQ ID NO: 4676 - RNA, 20 nt, synthetic construct
  source 1..20: mol_type = other RNA
acacactggggcctgtcgtg

SEQ ID NO: 4677 - RNA, 20 nt, synthetic construct
  source 1..20: mol_type = other RNA
tggctgtaatcccagctact

SEQ ID NO: 4678 - RNA, 20 nt, synthetic construct
  source 1..20: mol_type = other RNA
caggagaatcacttgaaacc

SEQ ID NO: 4679 - RNA, 20 nt, synthetic construct
  source 1..20: mol_type = other RNA
tgcctgtcatcccagctact

SEQ ID NO: 4680 - RNA, 20 nt, synthetic construct
  source 1..20: mol_type = other RNA
cacacactggggcctgtcgt

SEQ ID NO: 4681 - RNA, 20 nt, synthetic construct
  source 1..20: mol_type = other RNA
caggtggatcacctaaggtc

SEQ ID NO: 4682 - RNA, 20 nt, synthetic construct
  source 1..20: mol_type = other RNA
tgttgttgttgtttttgaga

SEQ ID NO: 4683 - RNA, 20 nt, synthetic construct
  source 1..20: mol_type = other RNA
tgcctctaatcccagctact

SEQ ID NO: 4684 - RNA, 20 nt, synthetic construct
  source 1..20: mol_type = other RNA
ggagtgcagtggagcgatct

SEQ ID NO: 4685 - RNA, 20 nt, synthetic construct
  source 1..20: mol_type = other RNA
cccagcacttcaggaggcca

SEQ ID NO: 4686 - RNA, 20 nt, synthetic construct
  source 1..20: mol_type = other RNA
ggctgtaatcccagctactc

SEQ ID NO: 4687 - RNA, 20 nt, synthetic construct
  source 1..20: mol_type = other RNA
tgcttgagcccaggaggtcg

SEQ ID NO: 4688 - RNA, 20 nt, synthetic construct
  source 1..20: mol_type = other RNA
tttgtatttttgtagagacg

SEQ ID NO: 4689 - RNA, 20 nt, synthetic construct
  source 1..20: mol_type = other RNA
ggagtcttactctgttgccc

SEQ ID NO: 4690 - RNA, 20 nt, synthetic construct
  source 1..20: mol_type = other RNA
ccttggcctcctgaagtgct

SEQ ID NO: 4691 - RNA, 20 nt, synthetic construct
  source 1..20: mol_type = other RNA
caggagctcaagaccagcct

SEQ ID NO: 4692 - RNA, 20 nt, synthetic construct
  source 1..20: mol_type = other RNA
ccaggctggtcttgagctcc

SEQ ID NO: 4693 - RNA, 20 nt, synthetic construct
  source 1..20: mol_type = other RNA
ccaggagctcaagaccagcc

SEQ ID NO: 4694 - RNA, 20 nt, synthetic construct
  source 1..20: mol_type = other RNA
gaatttcactcttgttgccc

SEQ ID NO: 4695 - RNA, 20 nt, synthetic construct
  source 1..20: mol_type = other RNA
cgatagtttgctcagaatga

SEQ ID NO: 4696 - RNA, 20 nt, synthetic construct
  source 1..20: mol_type = other RNA
cccagcactttgggaggaca

SEQ ID NO: 4697 - RNA, 20 nt, synthetic construct
  source 1..20: mol_type = other RNA
attctgagcaaactatcgca

SEQ ID NO: 4698 - RNA, 20 nt, synthetic construct
  source 1..20: mol_type = other RNA
ctaaagatacaaaaattagc

SEQ ID NO: 4699 - RNA, 20 nt, synthetic construct
  source 1..20: mol_type = other RNA
ccttgtcctcccaaagtgct

SEQ ID NO: 4700 - RNA, 20 nt, synthetic construct
  source 1..20: mol_type = other RNA
cgctccactgcactccagcc

SEQ ID NO: 4701 - RNA, 20 nt, synthetic construct
  source 1..20: mol_type = other RNA
gcgccattgtactccagcct

SEQ ID NO: 4702 - RNA, 20 nt, synthetic construct
  source 1..20: mol_type = other RNA
atctcaaaaaaaaaaaaaaa

SEQ ID NO: 4703 - RNA, 20 nt, synthetic construct
  source 1..20: mol_type = other RNA
gagcggggagggatagcatt

SEQ ID NO: 4704 - RNA, 20 nt, synthetic construct
  source 1..20: mol_type = other RNA
tcaagcgattctcctgcctc

SEQ ID NO: 4705 - RNA, 20 nt, synthetic construct
  source 1..20: mol_type = other RNA
ttaatccagtctatcactga

SEQ ID NO: 4706 - RNA, 20 nt, synthetic construct
  source 1..20: mol_type = other RNA
gagaatcgcttgaacccgga

SEQ ID NO: 4707 - RNA, 20 nt, synthetic construct
  source 1..20: mol_type = other RNA
gcctctaatcccagctactc

SEQ ID NO: 4708 - RNA, 20 nt, synthetic construct
  source 1..20: mol_type = other RNA
ttgtaattttagtagagacg

SEQ ID NO: 4709 - RNA, 20 nt, synthetic construct
  source 1..20: mol_type = other RNA
aatcgcttgaacccgggaga

SEQ ID NO: 4710 - RNA, 20 nt, synthetic construct
  source 1..20: mol_type = other RNA
ttttgctatgttggccaggc

SEQ ID NO: 4711 - RNA, 20 nt, synthetic construct
  source 1..20: mol_type = other RNA
taaaaatacaaacattagcc

SEQ ID NO: 4712 - RNA, 20 nt, synthetic construct
  source 1..20: mol_type = other RNA
tcacacactggggcctgtcg

SEQ ID NO: 4713 - RNA, 20 nt, synthetic construct
  source 1..20: mol_type = other RNA
ccatgttggtcaggctggtc

SEQ ID NO: 4714 - RNA, 20 nt, synthetic construct
  source 1..20: mol_type = other RNA
ccagaccagcctgaccaaca

SEQ ID NO: 4715 - RNA, 20 nt, synthetic construct
  source 1..20: mol_type = other RNA
tgactgtaatcccagcactt

SEQ ID NO: 4716 - RNA, 20 nt, synthetic construct
  source 1..20: mol_type = other RNA
caggctggtctcaaattcct

SEQ ID NO: 4717 - RNA, 20 nt, synthetic construct
  source 1..20: mol_type = other RNA
tgggaggatcccttgagccc

SEQ ID NO: 4718 - RNA, 20 nt, synthetic construct
  source 1..20: mol_type = other RNA
tgcaccactgcactccagtc

SEQ ID NO: 4719 - RNA, 20 nt, synthetic construct
  source 1..20: mol_type = other RNA
tcttactctgtcgcccaggc

SEQ ID NO: 4720 - RNA, 20 nt, synthetic construct
  source 1..20: mol_type = other RNA
tctcactctgttgcccagac

SEQ ID NO: 4721 - RNA, 20 nt, synthetic construct
  source 1..20: mol_type = other RNA
aactgcttgaacccaggagg

SEQ ID NO: 4722 - RNA, 20 nt, synthetic construct
  source 1..20: mol_type = other RNA
acacaaaaattagctgggca

SEQ ID NO: 4723 - RNA, 20 nt, synthetic construct
  source 1..20: mol_type = other RNA
ggattacaggcgtgagccac

SEQ ID NO: 4724 - RNA, 20 nt, synthetic construct
  source 1..20: mol_type = other RNA
gccgaggtgggcggatcatg

SEQ ID NO: 4725 - RNA, 20 nt, synthetic construct
  source 1..20: mol_type = other RNA
cagaagtttgagaccagcct

SEQ ID NO: 4726 - RNA, 20 nt, synthetic construct
  source 1..20: mol_type = other RNA
gaggtctcactatgttgccc

SEQ ID NO: 4727 - RNA, 20 nt, synthetic construct
  source 1..20: mol_type = other RNA
ttttgtatttttgtagagac

SEQ ID NO: 4728 - RNA, 20 nt, synthetic construct
  source 1..20: mol_type = other RNA
tcgggagttcgagaccagcc

SEQ ID NO: 4729 - RNA, 20 nt, synthetic construct
  source 1..20: mol_type = other RNA
tgcctgtaaccccagcactt

SEQ ID NO: 4730 - RNA, 20 nt, synthetic construct
  source 1..20: mol_type = other RNA
tttgtaattttagtagagac

SEQ ID NO: 4731 - RNA, 20 nt, synthetic construct
  source 1..20: mol_type = other RNA
gctccactgcactccagcct

SEQ ID NO: 4732 - RNA, 20 nt, synthetic construct
  source 1..20: mol_type = other RNA
gcaggcagatcacctgaggt

SEQ ID NO: 4733 - RNA, 20 nt, synthetic construct
  source 1..20: mol_type = other RNA
tcctgagtaactgggattac

SEQ ID NO: 4734 - RNA, 20 nt, synthetic construct
  source 1..20: mol_type = other RNA
cttggcctcccaaagtgctg

SEQ ID NO: 4735 - RNA, 20 nt, synthetic construct
  source 1..20: mol_type = other RNA
caggtgtgtgccaccacacc

SEQ ID NO: 4736 - RNA, 20 nt, synthetic construct
  source 1..20: mol_type = other RNA
ccaggctggtctcaaattcc

SEQ ID NO: 4737 - RNA, 20 nt, synthetic construct
  source 1..20: mol_type = other RNA
ccaggaatttgagaccagcc

SEQ ID NO: 4738 - RNA, 20 nt, synthetic construct
  source 1..20: mol_type = other RNA
tttttgtatttttgtagaga

SEQ ID NO: 4739 - RNA, 20 nt, synthetic construct
  source 1..20: mol_type = other RNA
tgtaatcccagcacttcagg

SEQ ID NO: 4740 - RNA, 20 nt, synthetic construct
  source 1..20: mol_type = other RNA
gagaactgcttgaacccagg

SEQ ID NO: 4741 - RNA, 20 nt, synthetic construct
  source 1..20: mol_type = other RNA
caggaatttgagaccagcct

SEQ ID NO: 4742 - RNA, 20 nt, synthetic construct
  source 1..20: mol_type = other RNA
tcagaagtttgagaccagcc

SEQ ID NO: 4743 - RNA, 20 nt, synthetic construct
  source 1..20: mol_type = other RNA
gactgtaatcccagcacttt

SEQ ID NO: 4744 - RNA, 20 nt, synthetic construct
  source 1..20: mol_type = other RNA
gcaccactgcactccagtct

SEQ ID NO: 4745 - RNA, 20 nt, synthetic construct
  source 1..20: mol_type = other RNA
taaaaattagccaggtgtgg

SEQ ID NO: 4746 - RNA, 20 nt, synthetic construct
  source 1..20: mol_type = other RNA
ttttgtaattttagtagaga

SEQ ID NO: 4747 - RNA, 20 nt, synthetic construct
  source 1..20: mol_type = other RNA
taaaaatacaaaaatcagct

SEQ ID NO: 4748 - RNA, 20 nt, synthetic construct
  source 1..20: mol_type = other RNA
gcctcggtctcccaaagtgc

SEQ ID NO: 4749 - RNA, 20 nt, synthetic construct
  source 1..20: mol_type = other RNA
gcactttgggagaccgaggc

SEQ ID NO: 4750 - RNA, 20 nt, synthetic construct
  source 1..20: mol_type = other RNA
agcactttgggagaccgagg

SEQ ID NO: 4751 - RNA, 20 nt, synthetic construct
  source 1..20: mol_type = other RNA
acctcatgatccgcccacct

SEQ ID NO: 4752 - RNA, 20 nt, synthetic construct
  source 1..20: mol_type = other RNA
cactgcaacctctgccttcc

SEQ ID NO: 4753 - RNA, 20 nt, synthetic construct
  source 1..20: mol_type = other RNA
tcttactctgttgcccaggc

SEQ ID NO: 4754 - RNA, 20 nt, synthetic construct
  source 1..20: mol_type = other RNA
cactgcagcctcgacctcct

SEQ ID NO: 4755 - RNA, 20 nt, synthetic construct
  source 1..20: mol_type = other RNA
aaaaaaaaaaaaaaaaagcc

SEQ ID NO: 4756 - RNA, 20 nt, synthetic construct
  source 1..20: mol_type = other RNA
ggggtttctccatgttggcc

SEQ ID NO: 4757 - RNA, 20 nt, synthetic construct
  source 1..20: mol_type = other RNA
caggagaactgcttgaaccc

SEQ ID NO: 4758 - RNA, 20 nt, synthetic construct
  source 1..20: mol_type = other RNA
ggtgggcggatcatgaggtc

SEQ ID NO: 4759 - RNA, 20 nt, synthetic construct
  source 1..20: mol_type = other RNA
ttgcccaggctggagtacaa

SEQ ID NO: 4760 - RNA, 20 nt, synthetic construct
  source 1..20: mol_type = other RNA
tcactgcagcctcgacctcc

SEQ ID NO: 4761 - RNA, 20 nt, synthetic construct
  source 1..20: mol_type = other RNA
tcactgcaacctctgccttc

SEQ ID NO: 4762 - RNA, 20 nt, synthetic construct
  source 1..20: mol_type = other RNA
gggattacaggcgtgagcca

SEQ ID NO: 4763 - RNA, 20 nt, synthetic construct
  source 1..20: mol_type = other RNA
gcctgtagtcccagctacta

SEQ ID NO: 4764 - RNA, 20 nt, synthetic construct
  source 1..20: mol_type = other RNA
ctaaaaatacaaaaatcagc

SEQ ID NO: 4765 - RNA, 20 nt, synthetic construct
  source 1..20: mol_type = other RNA
caggcgcccgccaccacacc

SEQ ID NO: 4766 - RNA, 20 nt, synthetic construct
  source 1..20: mol_type = other RNA
cccagcactttgggagaccg

SEQ ID NO: 4767 - RNA, 20 nt, synthetic construct
  source 1..20: mol_type = other RNA
ttgcccagactggagtgcag

SEQ ID NO: 4768 - RNA, 20 nt, synthetic construct
  source 1..20: mol_type = other RNA
caaaaaaaaaaaaaaaaaaa

SEQ ID NO: 4769 - RNA, 20 nt, synthetic construct
  source 1..20: mol_type = other RNA
acactttgggaggctgaggt

SEQ ID NO: 4770 - RNA, 20 nt, synthetic construct
  source 1..20: mol_type = other RNA
cctcggtctcccaaagtgct

SEQ ID NO: 4771 - RNA, 20 nt, synthetic construct
  source 1..20: mol_type = other RNA
tcactgcagccttgaactcc

SEQ ID NO: 4772 - RNA, 20 nt, synthetic construct
  source 1..20: mol_type = other RNA
aaaaaaaaaaaaaaaaaaga

SEQ ID NO: 4773 - RNA, 20 nt, synthetic construct
  source 1..20: mol_type = other RNA
gcctgtaaccccagcacttt

SEQ ID NO: 4774 - RNA, 20 nt, synthetic construct
  source 1..20: mol_type = other RNA
attattatactttaagttct

SEQ ID NO: 4775 - RNA, 20 nt, synthetic construct
  source 1..20: mol_type = other RNA
ttgtatttttagtagagact

SEQ ID NO: 4776 - RNA, 20 nt, synthetic construct
  source 1..20: mol_type = other RNA
tcgcccaggctggagtacag

SEQ ID NO: 4777 - RNA, 20 nt, synthetic construct
  source 1..20: mol_type = other RNA
cgaggcaggcagatcacctg

SEQ ID NO: 4778 - RNA, 20 nt, synthetic construct
  source 1..20: mol_type = other RNA
cgaggcaggcagatcacctg

SEQ ID NO: 4779 - RNA, 20 nt, synthetic construct
  source 1..20: mol_type = other RNA
tccctagtagctgggactac

SEQ ID NO: 4780 - RNA, 20 nt, synthetic construct
  source 1..20: mol_type = other RNA
tttctccatgttggccaggc

SEQ ID NO: 4781 - RNA, 20 nt, synthetic construct
  source 1..20: mol_type = other RNA
aatacaaaattagccaggca

SEQ ID NO: 4782 - RNA, 20 nt, synthetic construct
  source 1..20: mol_type = other RNA
tgtagtcccagctactaggg

SEQ ID NO: 4783 - RNA, 20 nt, synthetic construct
  source 1..20: mol_type = other RNA
ggagtgcaatggcgcaatct

SEQ ID NO: 4784 - RNA, 20 nt, synthetic construct
  source 1..20: mol_type = other RNA
acaaaattagccaggcatgg

SEQ ID NO: 4785 - RNA, 20 nt, synthetic construct
  source 1..20: mol_type = other RNA
aatggtgtgaacccgggagg

SEQ ID NO: 4786 - RNA, 20 nt, synthetic construct
  source 1..20: mol_type = other RNA
ttctcctgcctcagcctccc

SEQ ID NO: 4787 - RNA, 20 nt, synthetic construct
  source 1..20: mol_type = other RNA
tcaggagttccagaccagcc

SEQ ID NO: 4788 - RNA, 20 nt, synthetic construct
  source 1..20: mol_type = other RNA
tcccaaagtgctggggttac

SEQ ID NO: 4789 - RNA, 20 nt, synthetic construct
  source 1..20: mol_type = other RNA
tgtaaccccagcactttggg

SEQ ID NO: 4790 - RNA, 20 nt, synthetic construct
  source 1..20: mol_type = other RNA
aaaaaaaaaaaaaaaaaaag

SEQ ID NO: 4791 - RNA, 20 nt, synthetic construct
  source 1..20: mol_type = other RNA
tacaaaaaattagccgggtg

SEQ ID NO: 4792 - RNA, 20 nt, synthetic construct
  source 1..20: mol_type = other RNA
caggtgtgagccaccacacc

SEQ ID NO: 4793 - RNA, 20 nt, synthetic construct
  source 1..20: mol_type = other RNA
aacactttgggaggctgagg

SEQ ID NO: 4794 - RNA, 20 nt, synthetic construct
  source 1..20: mol_type = other RNA
ggtctcgaactcccgacctc

SEQ ID NO: 4795 - RNA, 20 nt, synthetic construct
  source 1..20: mol_type = other RNA
tacaaaaaattagccaggtg

SEQ ID NO: 4796 - RNA, 20 nt, synthetic construct
  source 1..20: mol_type = other RNA
caggcatgagccaccgcacc

SEQ ID NO: 4797 - RNA, 20 nt, synthetic construct
  source 1..20: mol_type = other RNA
tgcgccattgcactccagcc

SEQ ID NO: 4798 - RNA, 20 nt, synthetic construct
  source 1..20: mol_type = other RNA
ttattatactttaagttcta

SEQ ID NO: 4799 - RNA, 20 nt, synthetic construct
  source 1..20: mol_type = other RNA
gagaatggtgtgaacccggg

SEQ ID NO: 4800 - RNA, 20 nt, synthetic construct
  source 1..20: mol_type = other RNA
aattagccgggtgtggtggc

SEQ ID NO: 4801 - RNA, 20 nt, synthetic construct
  source 1..20: mol_type = other RNA
caccgcatgttctcactcat

SEQ ID NO: 4802 - RNA, 20 nt, synthetic construct
  source 1..20: mol_type = other RNA
caaggcaggtggatcacctg

SEQ ID NO: 4803 - RNA, 20 nt, synthetic construct
  source 1..20: mol_type = other RNA
cgcatgttctcactcatagg

SEQ ID NO: 4804 - RNA, 20 nt, synthetic construct
  source 1..20: mol_type = other RNA
aaattagccgggtgtggtgg

SEQ ID NO: 4805 - RNA, 20 nt, synthetic construct
  source 1..20: mol_type = other RNA
cgcctgtaatctcagcactt

SEQ ID NO: 4806 - RNA, 20 nt, synthetic construct
  source 1..20: mol_type = other RNA
ctcaggtgatctgcctgcct

SEQ ID NO: 4807 - RNA, 20 nt, synthetic construct
  source 1..20: mol_type = other RNA
ctcaggtgatctgcctgcct

SEQ ID NO: 4808 - RNA, 20 nt, synthetic construct
  source 1..20: mol_type = other RNA
gctactagggaggctgaggc

SEQ ID NO: 4809 - RNA, 20 nt, synthetic construct
  source 1..20: mol_type = other RNA
tgcttgaacccaggaggcgg

SEQ ID NO: 4810 - RNA, 20 nt, synthetic construct
  source 1..20: mol_type = other RNA
gcctcagcctccctagtagc

SEQ ID NO: 4811 - RNA, 20 nt, synthetic construct
  source 1..20: mol_type = other RNA
gagacggggtttctccatgt

SEQ ID NO: 4812 - RNA, 20 nt, synthetic construct
  source 1..20: mol_type = other RNA
gagtgagaacatgcggtgtt

SEQ ID NO: 4813 - RNA, 20 nt, synthetic construct
  source 1..20: mol_type = other RNA
ggtacatgtgcacaacgtgc

SEQ ID NO: 4814 - RNA, 20 nt, synthetic construct
  source 1..20: mol_type = other RNA
aaaaaattagccgggtgtgg

SEQ ID NO: 4815 - RNA, 20 nt, synthetic construct
  source 1..20: mol_type = other RNA
cctagcactttgggaggccg

SEQ ID NO: 4816 - RNA, 20 nt, synthetic construct
  source 1..20: mol_type = other RNA
caggcgtgagccactgtgcc

SEQ ID NO: 4817 - RNA, 20 nt, synthetic construct
  source 1..20: mol_type = other RNA
cccagctactagggaggctg

SEQ ID NO: 4818 - RNA, 20 nt, synthetic construct
  source 1..20: mol_type = other RNA
cccagctactagggaggctg

SEQ ID NO: 4819 - RNA, 20 nt, synthetic construct
  source 1..20: mol_type = other RNA
cgcctgtaatcctagcactt

SEQ ID NO: 4820 - RNA, 20 nt, synthetic construct
  source 1..20: mol_type = other RNA
tgtagggacatggatgaagc

SEQ ID NO: 4821 - RNA, 20 nt, synthetic construct
  source 1..20: mol_type = other RNA
cctcagcctccctagtagct

SEQ ID NO: 4822 - RNA, 20 nt, synthetic construct
  source 1..20: mol_type = other RNA
cctcagcctccctagtagct

SEQ ID NO: 4823 - RNA, 20 nt, synthetic construct
  source 1..20: mol_type = other RNA
tgcctgtaatcctagcactt

SEQ ID NO: 4824 - RNA, 20 nt, synthetic construct
  source 1..20: mol_type = other RNA
caggcagatcacctgaggtc

SEQ ID NO: 4825 - RNA, 20 nt, synthetic construct
  source 1..20: mol_type = other RNA
caggcagatcacctgaggtc

SEQ ID NO: 4826 - RNA, 20 nt, synthetic construct
  source 1..20: mol_type = other RNA
gcatgttctcactcataggt

SEQ ID NO: 4827 - RNA, 20 nt, synthetic construct
  source 1..20: mol_type = other RNA
cacctatgagtgagaacatg

SEQ ID NO: 4828 - RNA, 20 nt, synthetic construct
  source 1..20: mol_type = other RNA
gcaggagaatggtgtgaacc

SEQ ID NO: 4829 - RNA, 20 nt, synthetic construct
  source 1..20: mol_type = other RNA
caggcatgagccaccatgcc

SEQ ID NO: 4830 - RNA, 20 nt, synthetic construct
  source 1..20: mol_type = other RNA
caggagaatggtgtgaaccc

SEQ ID NO: 4831 - RNA, 20 nt, synthetic construct
  source 1..20: mol_type = other RNA
catgccattgcactccagcc

SEQ ID NO: 4832 - RNA, 20 nt, synthetic construct
  source 1..20: mol_type = other RNA
tctcactatgttgcccaggc

SEQ ID NO: 4833 - RNA, 20 nt, synthetic construct
  source 1..20: mol_type = other RNA
atgccattgcactccagcct

SEQ ID NO: 4834 - RNA, 20 nt, synthetic construct
  source 1..20: mol_type = other RNA
aaaaaattagccaggtgtgg

SEQ ID NO: 4835 - RNA, 20 nt, synthetic construct
  source 1..20: mol_type = other RNA
tatgtatacatgtgccatgt

SEQ ID NO: 4836 - RNA, 20 nt, synthetic construct
  source 1..20: mol_type = other RNA
ggggtttcactgtgttagcc

SEQ ID NO: 4837 - RNA, 20 nt, synthetic construct
  source 1..20: mol_type = other RNA
gagtttcactcttgttgccc

SEQ ID NO: 4838 - RNA, 20 nt, synthetic construct
  source 1..20: mol_type = other RNA
ctcaggtgatccacctgcct

SEQ ID NO: 4839 - RNA, 20 nt, synthetic construct
  source 1..20: mol_type = other RNA
ttcactcttgttgcccaggc

SEQ ID NO: 4840 - RNA, 20 nt, synthetic construct
  source 1..20: mol_type = other RNA
ttcactcttgttgcccaggc

SEQ ID NO: 4841 - RNA, 20 nt, synthetic construct
  source 1..20: mol_type = other RNA
gcctgtaatctcagcacttt

SEQ ID NO: 4842 - RNA, 20 nt, synthetic construct
  source 1..20: mol_type = other RNA
gcgccattgcactccagcct

SEQ ID NO: 4843 - RNA, 20 nt, synthetic construct
  source 1..20: mol_type = other RNA
ggggtttcaccatgttggtc

SEQ ID NO: 4844 - RNA, 20 nt, synthetic construct
  source 1..20: mol_type = other RNA
acctcagcctcctgagtagc

SEQ ID NO: 4845 - RNA, 20 nt, synthetic construct
  source 1..20: mol_type = other RNA
agctactcaggaggctgagg

SEQ ID NO: 4846 - RNA, 20 nt, synthetic construct
  source 1..20: mol_type = other RNA
agctactcaggaggctgagg

SEQ ID NO: 4847 - RNA, 20 nt, synthetic construct
  source 1..20: mol_type = other RNA
gctactcaggaggctgaggt

SEQ ID NO: 4848 - RNA, 20 nt, synthetic construct
  source 1..20: mol_type = other RNA
tttttttttttttttgagac

SEQ ID NO: 4849 - RNA, 20 nt, synthetic construct
  source 1..20: mol_type = other RNA
tttttttttttttttgagac

SEQ ID NO: 4850 - RNA, 20 nt, synthetic construct
  source 1..20: mol_type = other RNA
ttttttttttttttgagaca

SEQ ID NO: 4851 - RNA, 20 nt, synthetic construct
  source 1..20: mol_type = other RNA
ttttttttttttttgagaca

SEQ ID NO: 4852 - RNA, 20 nt, synthetic construct
  source 1..20: mol_type = other RNA
tttcactgtgttagccagga

SEQ ID NO: 4853 - RNA, 20 nt, synthetic construct
  source 1..20: mol_type = other RNA
tcacccaggctggagtgcaa

SEQ ID NO: 4854 - RNA, 20 nt, synthetic construct
  source 1..20: mol_type = other RNA
acctgtaatcccagctactt

SEQ ID NO: 4855 - RNA, 20 nt, synthetic construct
  source 1..20: mol_type = other RNA
ctaaaaatacaaaattagcc

SEQ ID NO: 4856 - RNA, 20 nt, synthetic construct
  source 1..20: mol_type = other RNA
gcctgtaatcctagcacttt

SEQ ID NO: 4857 - RNA, 20 nt, synthetic construct
  source 1..20: mol_type = other RNA
gcctgtaatcctagcacttt

SEQ ID NO: 4858 - RNA, 20 nt, synthetic construct
  source 1..20: mol_type = other RNA
ggagtgcagtggcgtgatct

SEQ ID NO: 4859 - RNA, 20 nt, synthetic construct
  source 1..20: mol_type = other RNA
ggagtgcagtggcgtgatct

SEQ ID NO: 4860 - RNA, 20 nt, synthetic construct
  source 1..20: mol_type = other RNA
tcccaaagtgctgagattac

SEQ ID NO: 4861 - RNA, 20 nt, synthetic construct
  source 1..20: mol_type = other RNA
tgtaatctcagcactttggg

SEQ ID NO: 4862 - RNA, 20 nt, synthetic construct
  source 1..20: mol_type = other RNA
tagactggattaagaaaatg

SEQ ID NO: 4863 - RNA, 20 nt, synthetic construct
  source 1..20: mol_type = other RNA
tttcaccatgttggtcaggc

SEQ ID NO: 4864 - RNA, 20 nt, synthetic construct
  source 1..20: mol_type = other RNA
cactgcaacctccgcctcct

SEQ ID NO: 4865 - RNA, 20 nt, synthetic construct
  source 1..20: mol_type = other RNA
ggagtctcgctctgtcgccc

SEQ ID NO: 4866 - RNA, 20 nt, synthetic construct
  source 1..20: mol_type = other RNA
aatgtggcacatatacacca

SEQ ID NO: 4867 - RNA, 20 nt, synthetic construct
  source 1..20: mol_type = other RNA
acgccactgcactccagcct

SEQ ID NO: 4868 - RNA, 20 nt, synthetic construct
  source 1..20: mol_type = other RNA
tcccaaagtgctaggattac

SEQ ID NO: 4869 - RNA, 20 nt, synthetic construct
  source 1..20: mol_type = other RNA
tcccaaagtgctaggattac

SEQ ID NO: 4870 - RNA, 20 nt, synthetic construct
  source 1..20: mol_type = other RNA
ggagtgcagtggcgcgatct

SEQ ID NO: 4871 - RNA, 20 nt, synthetic construct
  source 1..20: mol_type = other RNA
cacgccactgcactccagcc

SEQ ID NO: 4872 - RNA, 20 nt, synthetic construct
  source 1..20: mol_type = other RNA
tgtaatcctagcactttggg

SEQ ID NO: 4873 - RNA, 20 nt, synthetic construct
  source 1..20: mol_type = other RNA
caaaaattagctgggcatgg

SEQ ID NO: 4874 - RNA, 20 nt, synthetic construct
  source 1..20: mol_type = other RNA
ctttgggaggctgaggtggg

SEQ ID NO: 4875 - RNA, 20 nt, synthetic construct
  source 1..20: mol_type = other RNA
ggtctcaaactcctgacctc

SEQ ID NO: 4876 - RNA, 20 nt, synthetic construct
  source 1..20: mol_type = other RNA
gagaatcgcttgaacccagg

SEQ ID NO: 4877 - RNA, 20 nt, synthetic construct
  source 1..20: mol_type = other RNA
caggcgtgagccaccgcgcc

SEQ ID NO: 4878 - RNA, 20 nt, synthetic construct
  source 1..20: mol_type = other RNA
ctttgggaggccaaggcagg

SEQ ID NO: 4879 - RNA, 20 nt, synthetic construct
  source 1..20: mol_type = other RNA
ggtcttgaactcctgacctc

SEQ ID NO: 4880 - RNA, 20 nt, synthetic construct
  source 1..20: mol_type = other RNA
tctcgctctgtcgcccaggc

SEQ ID NO: 4881 - RNA, 20 nt, synthetic construct
  source 1..20: mol_type = other RNA
ctttgggaggccgaggtggg

SEQ ID NO: 4882 - RNA, 20 nt, synthetic construct
  source 1..20: mol_type = other RNA
cacctgtaatcccagctact

SEQ ID NO: 4883 - RNA, 20 nt, synthetic construct
  source 1..20: mol_type = other RNA
cgcgccactgcactccagcc

SEQ ID NO: 4884 - RNA, 20 nt, synthetic construct
  source 1..20: mol_type = other RNA
acctgtagtcccagctactc

SEQ ID NO: 4885 - RNA, 20 nt, synthetic construct
  source 1..20: mol_type = other RNA
agggtttcaccatgttggcc

SEQ ID NO: 4886 - RNA, 20 nt, synthetic construct
  source 1..20: mol_type = other RNA
cactgcaagctccgcctccc

SEQ ID NO: 4887 - RNA, 20 nt, synthetic construct
  source 1..20: mol_type = other RNA
tgcctgtagtcccagctact

SEQ ID NO: 4888 - RNA, 20 nt, synthetic construct
  source 1..20: mol_type = other RNA
ggtctcgaactcctgacctc

SEQ ID NO: 4889 - RNA, 20 nt, synthetic construct
  source 1..20: mol_type = other RNA
tcactgcaagctccgcctcc

SEQ ID NO: 4890 - RNA, 20 nt, synthetic construct
  source 1..20: mol_type = other RNA
cactgcaacctccgcctccc

SEQ ID NO: 4891 - RNA, 20 nt, synthetic construct
  source 1..20: mol_type = other RNA
gcactttgggaggccgaggt

SEQ ID NO: 4892 - RNA, 20 nt, synthetic construct
  source 1..20: mol_type = other RNA
tcactgcaacctccgcctcc

SEQ ID NO: 4893 - RNA, 20 nt, synthetic construct
  source 1..20: mol_type = other RNA
caagaccagcctggccaaca

SEQ ID NO: 4894 - RNA, 20 nt, synthetic construct
  source 1..20: mol_type = other RNA
gagatggggtttcaccatgt

SEQ ID NO: 4895 - RNA, 20 nt, synthetic construct
  source 1..20: mol_type = other RNA
tgtagtcccagctactcagg

SEQ ID NO: 4896 - RNA, 20 nt, synthetic construct
  source 1..20: mol_type = other RNA
tgtagtcccagctactcagg

SEQ ID NO: 4897 - RNA, 20 nt, synthetic construct
  source 1..20: mol_type = other RNA
tcctgagtagctgggactac

SEQ ID NO: 4898 - RNA, 20 nt, synthetic construct
  source 1..20: mol_type = other RNA
tcctgagtagctgggactac

SEQ ID NO: 4899 - RNA, 20 nt, synthetic construct
  source 1..20: mol_type = other RNA
caggagaatcgcttgaaccc

SEQ ID NO: 4900 - RNA, 20 nt, synthetic construct
  source 1..20: mol_type = other RNA
caggagaatcgcttgaaccc

SEQ ID NO: 4901 - RNA, 20 nt, synthetic construct
  source 1..20: mol_type = other RNA
cgagaccagcctggccaaca

SEQ ID NO: 4902 - RNA, 20 nt, synthetic construct
  source 1..20: mol_type = other RNA
gcaggagaatcgcttgaacc

SEQ ID NO: 4903 - RNA, 20 nt, synthetic construct
  source 1..20: mol_type = other RNA
gcaggagaatcgcttgaacc

SEQ ID NO: 4904 - RNA, 20 nt, synthetic construct
  source 1..20: mol_type = other RNA
tgtaatcccagctactcggg

SEQ ID NO: 4905 - RNA, 20 nt, synthetic construct
  source 1..20: mol_type = other RNA
taaaaatacaaaaaattagc

SEQ ID NO: 4906 - RNA, 20 nt, synthetic construct
  source 1..20: mol_type = other RNA
gcgccactgcactccagcct

SEQ ID NO: 4907 - RNA, 20 nt, synthetic construct
  source 1..20: mol_type = other RNA
tcccaagtagctgggattac

SEQ ID NO: 4908 - RNA, 20 nt, synthetic construct
  source 1..20: mol_type = other RNA
tgtaatcccagctacttggg

SEQ ID NO: 4909 - RNA, 20 nt, synthetic construct
  source 1..20: mol_type = other RNA
tcaggagttcaagaccagcc

SEQ ID NO: 4910 - RNA, 20 nt, synthetic construct
  source 1..20: mol_type = other RNA
tcaggagttcgagaccagcc

SEQ ID NO: 4911 - RNA, 20 nt, synthetic construct
  source 1..20: mol_type = other RNA
tcaggagttcgagaccagcc

SEQ ID NO: 4912 - RNA, 20 nt, synthetic construct
  source 1..20: mol_type = other RNA
aaaaatacaaaaaattagcc

SEQ ID NO: 4913 - RNA, 20 nt, synthetic construct
  source 1..20: mol_type = other RNA
aaaaatacaaaaaattagcc

SEQ ID NO: 4914 - RNA, 20 nt, synthetic construct
  source 1..20: mol_type = other RNA
tcaggagatcgagaccatcc

SEQ ID NO: 4915 - RNA, 20 nt, synthetic construct
  source 1..20: mol_type = other RNA
gccttggcctcccaaagtgc

SEQ ID NO: 4916 - RNA, 20 nt, synthetic construct
  source 1..20: mol_type = other RNA
gccttggcctcccaaagtgc

SEQ ID NO: 4917 - RNA, 20 nt, synthetic construct
  source 1..20: mol_type = other RNA
gcactttgggaggccaaggc

SEQ ID NO: 4918 - RNA, 20 nt, synthetic construct
  source 1..20: mol_type = other RNA
gcactttgggaggccaaggc

SEQ ID NO: 4919 - RNA, 20 nt, synthetic construct
  source 1..20: mol_type = other RNA
gcctcagcctcccaaagtgc

SEQ ID NO: 4920 - RNA, 20 nt, synthetic construct
  source 1..20: mol_type = other RNA
gcactttgggaggctgaggc

SEQ ID NO: 4921 - RNA, 20 nt, synthetic construct
  source 1..20: mol_type = other RNA
agcactttgggaggctgagg

SEQ ID NO: 4922 - RNA, 20 nt, synthetic construct
  source 1..20: mol_type = other RNA
tcgcccaggctggagtgcag

SEQ ID NO: 4923 - RNA, 20 nt, synthetic construct
  source 1..20: mol_type = other RNA
tcgcccaggctggagtgcag

SEQ ID NO: 4924 - RNA, 20 nt, synthetic construct
  source 1..20: mol_type = other RNA
ttgtatttttagtagagaca

SEQ ID NO: 4925 - RNA, 20 nt, synthetic construct
  source 1..20: mol_type = other RNA
ttgtatttttagtagagaca

SEQ ID NO: 4926 - RNA, 20 nt, synthetic construct
  source 1..20: mol_type = other RNA
ttgcccaggctggagtgcag

SEQ ID NO: 4927 - RNA, 20 nt, synthetic construct
  source 1..20: mol_type = other RNA
cacctgtaatcccagcactt

SEQ ID NO: 4928 - RNA, 20 nt, synthetic construct
  source 1..20: mol_type = other RNA
gcctgtagtcccagctactc

SEQ ID NO: 4929 - RNA, 20 nt, synthetic construct
  source 1..20: mol_type = other RNA
acctgtaatcccagcacttt

SEQ ID NO: 4930 - RNA, 20 nt, synthetic construct
  source 1..20: mol_type = other RNA
gctacttgggaggctgaggc

SEQ ID NO: 4931 - RNA, 20 nt, synthetic construct
  source 1..20: mol_type = other RNA
gctactcaggaggctgaggc

SEQ ID NO: 4932 - RNA, 20 nt, synthetic construct
  source 1..20: mol_type = other RNA
cccagcactttgggaggcca

SEQ ID NO: 4933 - RNA, 20 nt, synthetic construct
  source 1..20: mol_type = other RNA
cccagcactttgggaggcca

SEQ ID NO: 4934 - RNA, 20 nt, synthetic construct
  source 1..20: mol_type = other RNA
gcctcagcctcccaagtagc

SEQ ID NO: 4935 - RNA, 20 nt, synthetic construct
  source 1..20: mol_type = other RNA
gcctcggcctcccaaagtgc

SEQ ID NO: 4936 - RNA, 20 nt, synthetic construct
  source 1..20: mol_type = other RNA
gcctcggcctcccaaagtgc

SEQ ID NO: 4937 - RNA, 20 nt, synthetic construct
  source 1..20: mol_type = other RNA
ttgtatttttagtagagatg

SEQ ID NO: 4938 - RNA, 20 nt, synthetic construct
  source 1..20: mol_type = other RNA
ttttttttttttttttgaga

SEQ ID NO: 4939 - RNA, 20 nt, synthetic construct
  source 1..20: mol_type = other RNA
ttttttttttttttttgaga

SEQ ID NO: 4940 - RNA, 20 nt, synthetic construct
  source 1..20: mol_type = other RNA
ccttggcctcccaaagtgct

SEQ ID NO: 4941 - RNA, 20 nt, synthetic construct
  source 1..20: mol_type = other RNA
ccttggcctcccaaagtgct

SEQ ID NO: 4942 - RNA, 20 nt, synthetic construct
  source 1..20: mol_type = other RNA
cccagcactttgggaggctg

SEQ ID NO: 4943 - RNA, 20 nt, synthetic construct
  source 1..20: mol_type = other RNA
gcactttgggaggccgaggc

SEQ ID NO: 4944 - RNA, 20 nt, synthetic construct
  source 1..20: mol_type = other RNA
gcactttgggaggccgaggc

SEQ ID NO: 4945 - RNA, 20 nt, synthetic construct
  source 1..20: mol_type = other RNA
gcctcagcctcctgagtagc

SEQ ID NO: 4946 - RNA, 20 nt, synthetic construct
  source 1..20: mol_type = other RNA
tttgtatttttagtagagat

SEQ ID NO: 4947 - RNA, 20 nt, synthetic construct
  source 1..20: mol_type = other RNA
tttcaccatgttggccaggc

SEQ ID NO: 4948 - RNA, 20 nt, synthetic construct
  source 1..20: mol_type = other RNA
gctactcgggaggctgaggc

SEQ ID NO: 4949 - RNA, 20 nt, synthetic construct
  source 1..20: mol_type = other RNA
agcactttgggaggccgagg

SEQ ID NO: 4950 - RNA, 20 nt, synthetic construct
  source 1..20: mol_type = other RNA
cccagctacttgggaggctg

SEQ ID NO: 4951 - RNA, 20 nt, synthetic construct
  source 1..20: mol_type = other RNA
tgcctgtaatcccagcactt

SEQ ID NO: 4952 - RNA, 20 nt, synthetic construct
  source 1..20: mol_type = other RNA
cctcagcctcccaaagtgct

SEQ ID NO: 4953 - RNA, 20 nt, synthetic construct
  source 1..20: mol_type = other RNA
cctcagcctcccaagtagct

SEQ ID NO: 4954 - RNA, 20 nt, synthetic construct
  source 1..20: mol_type = other RNA
cccagctactcaggaggctg

SEQ ID NO: 4955 - RNA, 20 nt, synthetic construct
  source 1..20: mol_type = other RNA
cccagctactcaggaggctg

SEQ ID NO: 4956 - RNA, 20 nt, synthetic construct
  source 1..20: mol_type = other RNA
gcctcagcctcccgagtagc

SEQ ID NO: 4957 - RNA, 20 nt, synthetic construct
  source 1..20: mol_type = other RNA
cctcagcctcctgagtagct

SEQ ID NO: 4958 - RNA, 20 nt, synthetic construct
  source 1..20: mol_type = other RNA
cctcagcctcctgagtagct

SEQ ID NO: 4959 - RNA, 20 nt, synthetic construct
  source 1..20: mol_type = other RNA
cccagctactcgggaggctg

SEQ ID NO: 4960 - RNA, 20 nt, synthetic construct
  source 1..20: mol_type = other RNA
ttgtatttttagtagagacg

SEQ ID NO: 4961 - RNA, 20 nt, synthetic construct
  source 1..20: mol_type = other RNA
cctcagcctcccgagtagct

SEQ ID NO: 4962 - RNA, 20 nt, synthetic construct
  source 1..20: mol_type = other RNA
cccagcactttgggaggccg

SEQ ID NO: 4963 - RNA, 20 nt, synthetic construct
  source 1..20: mol_type = other RNA
cccagcactttgggaggccg

SEQ ID NO: 4964 - RNA, 20 nt, synthetic construct
  source 1..20: mol_type = other RNA
cctcggcctcccaaagtgct

SEQ ID NO: 4965 - RNA, 20 nt, synthetic construct
  source 1..20: mol_type = other RNA
cctcggcctcccaaagtgct

SEQ ID NO: 4966 - RNA, 20 nt, synthetic construct
  source 1..20: mol_type = other RNA
cctcggcctcccaaagtgct

SEQ ID NO: 4967 - RNA, 20 nt, synthetic construct
  source 1..20: mol_type = other RNA
cgcctgtaatcccagcactt

SEQ ID NO: 4968 - RNA, 20 nt, synthetic construct
  source 1..20: mol_type = other RNA
cgcctgtaatcccagcactt

SEQ ID NO: 4969 - RNA, 20 nt, synthetic construct
  source 1..20: mol_type = other RNA
cgcctgtaatcccagcactt

SEQ ID NO: 4970 - RNA, 20 nt, synthetic construct
  source 1..20: mol_type = other RNA
tttgtatttttagtagagac

SEQ ID NO: 4971 - RNA, 20 nt, synthetic construct
  source 1..20: mol_type = other RNA
tttgtatttttagtagagac

SEQ ID NO: 4972 - RNA, 20 nt, synthetic construct
  source 1..20: mol_type = other RNA
tttgtatttttagtagagac

SEQ ID NO: 4973 - RNA, 20 nt, synthetic construct
  source 1..20: mol_type = other RNA
tttgtatttttagtagagac

SEQ ID NO: 4974 - RNA, 20 nt, synthetic construct
  source 1..20: mol_type = other RNA
ttttgtatttttagtagaga

SEQ ID NO: 4975 - RNA, 20 nt, synthetic construct
  source 1..20: mol_type = other RNA
ttttgtatttttagtagaga

SEQ ID NO: 4976 - RNA, 20 nt, synthetic construct
  source 1..20: mol_type = other RNA
gcctgtaatcccagcacttt

SEQ ID NO: 4977 - RNA, 20 nt, synthetic construct
  source 1..20: mol_type = other RNA
gcctgtaatcccagcacttt

SEQ ID NO: 4978 - RNA, 20 nt, synthetic construct
  source 1..20: mol_type = other RNA
gcctgtaatcccagcacttt

SEQ ID NO: 4979 - RNA, 20 nt, synthetic construct
  source 1..20: mol_type = other RNA
gcctgtaatcccagcacttt

SEQ ID NO: 4980 - RNA, 20 nt, synthetic construct
  source 1..20: mol_type = other RNA
tcccaaagtgctgggattac

SEQ ID NO: 4981 - RNA, 20 nt, synthetic construct
  source 1..20: mol_type = other RNA
tcccaaagtgctgggattac

SEQ ID NO: 4982 - RNA, 20 nt, synthetic construct
  source 1..20: mol_type = other RNA
tcccaaagtgctgggattac

SEQ ID NO: 4983 - RNA, 20 nt, synthetic construct
  source 1..20: mol_type = other RNA
tcccaaagtgctgggattac

SEQ ID NO: 4984 - RNA, 20 nt, synthetic construct
  source 1..20: mol_type = other RNA
tcccaaagtgctgggattac

SEQ ID NO: 4985 - RNA, 20 nt, synthetic construct
  source 1..20: mol_type = other RNA
tgtaatcccagcactttggg

SEQ ID NO: 4986 - RNA, 20 nt, synthetic construct
  source 1..20: mol_type = other RNA
tgtaatcccagcactttggg

SEQ ID NO: 4987 - RNA, 20 nt, synthetic construct
  source 1..20: mol_type = other RNA
tgtaatcccagcactttggg

SEQ ID NO: 4988 - RNA, 20 nt, synthetic construct
  source 1..20: mol_type = other RNA
tgtaatcccagcactttggg

SEQ ID NO: 4989 - RNA, 20 nt, synthetic construct
  source 1..20: mol_type = other RNA
tgtaatcccagcactttggg

SEQ ID NO: 4990 - RNA, 20 nt, synthetic construct
  source 1..20: mol_type = other RNA
acctgagtaataaaaattgt

SEQ ID NO: 4991 - RNA, 20 nt, synthetic construct
  source 1..20: mol_type = other RNA
tccaacaatttttattactc

SEQ ID NO: 4992 - RNA, 20 nt, synthetic construct
  source 1..20: mol_type = other RNA
caacatgccaattagttcac

SEQ ID NO: 4993 - RNA, 20 nt, synthetic construct
  source 1..20: mol_type = other RNA
ttaataacctgtgaactaat

SEQ ID NO: 4994 - RNA, 20 nt, synthetic construct
  source 1..20: mol_type = other RNA
tcacaggttattaatttaaa

SEQ ID NO: 4995 - RNA, 20 nt, synthetic construct
  source 1..20: mol_type = other RNA
tttaaaaggtcactgttgtg

SEQ ID NO: 4996 - RNA, 20 nt, synthetic construct
  source 1..20: mol_type = other RNA
ctttgtcactgtcttgctcc

SEQ ID NO: 4997 - RNA, 20 nt, synthetic construct
  source 1..20: mol_type = other RNA
ctgtcttgctcctggcttcc

SEQ ID NO: 4998 - RNA, 20 nt, synthetic construct
  source 1..20: mol_type = other RNA
cctggcttcctggtttcatg

SEQ ID NO: 4999 - RNA, 20 nt, synthetic construct
  source 1..20: mol_type = other RNA
cctcatgaaaccaggaagcc

SEQ ID NO: 5000 - RNA, 20 nt, synthetic construct
  source 1..20: mol_type = other RNA
agaaggttcctcatgaaacc

SEQ ID NO: 5001 - RNA, 20 nt, synthetic construct
  source 1..20: mol_type = other RNA
aatatcatttgaactttaga

SEQ ID NO: 5002 - RNA, 20 nt, synthetic construct
  source 1..20: mol_type = other RNA
attgaaactcaacagaaaga

SEQ ID NO: 5003 - RNA, 20 nt, synthetic construct
  source 1..20: mol_type = other RNA
aaactcaacagaaagaagga

SEQ ID NO: 5004 - RNA, 20 nt, synthetic construct
  source 1..20: mol_type = other RNA
aactcaacagaaagaaggaa

SEQ ID NO: 5005 - RNA, 20 nt, synthetic construct
  source 1..20: mol_type = other RNA
ttgtttttatagaaactctg

SEQ ID NO: 5006 - RNA, 20 nt, synthetic construct
  source 1..20: mol_type = other RNA
taatgagaagtcatgtttct

SEQ ID NO: 5007 - RNA, 20 nt, synthetic construct
  source 1..20: mol_type = other RNA
tcatgtttcttggaaatttt

SEQ ID NO: 5008 - RNA, 20 nt, synthetic construct
  source 1..20: mol_type = other RNA
tgtttcttggaaattttagg

SEQ ID NO: 5009 - RNA, 20 nt, synthetic construct
  source 1..20: mol_type = other RNA
tagaatttaatattgtaagc

SEQ ID NO: 5010 - RNA, 20 nt, synthetic construct
  source 1..20: mol_type = other RNA
tgtaagccggactattactg

SEQ ID NO: 5011 - RNA, 20 nt, synthetic construct
  source 1..20: mol_type = other RNA
gtaagccggactattactga

SEQ ID NO: 5012 - RNA, 20 nt, synthetic construct
  source 1..20: mol_type = other RNA
cttaaccctcagtaatagtc

SEQ ID NO: 5013 - RNA, 20 nt, synthetic construct
  source 1..20: mol_type = other RNA
cggactattactgagggtta

SEQ ID NO: 5014 - RNA, 20 nt, synthetic construct
  source 1..20: mol_type = other RNA
gaagctattaatagctctgc

SEQ ID NO: 5015 - RNA, 20 nt, synthetic construct
  source 1..20: mol_type = other RNA
aagctattaatagctctgct

SEQ ID NO: 5016 - RNA, 20 nt, synthetic construct
  source 1..20: mol_type = other RNA
tgctgggacaagtgtaaatg

SEQ ID NO: 5017 - RNA, 20 nt, synthetic construct
  source 1..20: mol_type = other RNA
gtgtaaatgaggactgtccc

SEQ ID NO: 5018 - RNA, 20 nt, synthetic construct
  source 1..20: mol_type = other RNA
aggactgtcccaggcaaatc

SEQ ID NO: 5019 - RNA, 20 nt, synthetic construct
  source 1..20: mol_type = other RNA
tcccaggcaaatcaggacaa

SEQ ID NO: 5020 - RNA, 20 nt, synthetic construct
  source 1..20: mol_type = other RNA
cccaggcaaatcaggacaaa

SEQ ID NO: 5021 - RNA, 20 nt, synthetic construct
  source 1..20: mol_type = other RNA
ccctttgtcctgatttgcct

SEQ ID NO: 5022 - RNA, 20 nt, synthetic construct
  source 1..20: mol_type = other RNA
accctttgtcctgatttgcc

SEQ ID NO: 5023 - RNA, 20 nt, synthetic construct
  source 1..20: mol_type = other RNA
gggtcaccctagtttaaata

SEQ ID NO: 5024 - RNA, 20 nt, synthetic construct
  source 1..20: mol_type = other RNA
gctaatccatatttaaacta

SEQ ID NO: 5025 - RNA, 20 nt, synthetic construct
  source 1..20: mol_type = other RNA
tgctaatccatatttaaact

SEQ ID NO: 5026 - RNA, 20 nt, synthetic construct
  source 1..20: mol_type = other RNA
tttaaatatggattagcata

SEQ ID NO: 5027 - RNA, 20 nt, synthetic construct
  source 1..20: mol_type = other RNA
tattagactgcagtggtgct

SEQ ID NO: 5028 - RNA, 20 nt, synthetic construct
  source 1..20: mol_type = other RNA
agacttctattagactgcag

SEQ ID NO: 5029 - RNA, 20 nt, synthetic construct
  source 1..20: mol_type = other RNA
tagggtttattgactttctt

SEQ ID NO: 5030 - RNA, 20 nt, synthetic construct
  source 1..20: mol_type = other RNA
tggaatatattgagtcttta

SEQ ID NO: 5031 - RNA, 20 nt, synthetic construct
  source 1..20: mol_type = other RNA
atggaatatattgagtcttt

SEQ ID NO: 5032 - RNA, 20 nt, synthetic construct
  source 1..20: mol_type = other RNA
atttagaagtttaaaagtga

SEQ ID NO: 5033 - RNA, 20 nt, synthetic construct
  source 1..20: mol_type = other RNA
cacttttaaacttctaaatg

SEQ ID NO: 5034 - RNA, 20 nt, synthetic construct
  source 1..20: mol_type = other RNA
taaacttctaaatgtggccc

SEQ ID NO: 5035 - RNA, 20 nt, synthetic construct
  source 1..20: mol_type = other RNA
cttctaaatgtggccctggc

SEQ ID NO: 5036 - RNA, 20 nt, synthetic construct
  source 1..20: mol_type = other RNA
taagcatattatgcctgcca

SEQ ID NO: 5037 - RNA, 20 nt, synthetic construct
  source 1..20: mol_type = other RNA
ttaagcatattatgcctgcc

SEQ ID NO: 5038 - RNA, 20 nt, synthetic construct
  source 1..20: mol_type = other RNA
aggcataatatgcttaaata

SEQ ID NO: 5039 - RNA, 20 nt, synthetic construct
  source 1..20: mol_type = other RNA
agagagtattatgtctaaga

SEQ ID NO: 5040 - RNA, 20 nt, synthetic construct
  source 1..20: mol_type = other RNA
gggcactagagaggtaagag

SEQ ID NO: 5041 - RNA, 20 nt, synthetic construct
  source 1..20: mol_type = other RNA
tgaattgatgggcactagag

SEQ ID NO: 5042 - RNA, 20 nt, synthetic construct
  source 1..20: mol_type = other RNA
aaaaggaattctgaattgat

SEQ ID NO: 5043 - RNA, 20 nt, synthetic construct
  source 1..20: mol_type = other RNA
taaaaggaattctgaattga

SEQ ID NO: 5044 - RNA, 20 nt, synthetic construct
  source 1..20: mol_type = other RNA
ttgaaagtataaactttaaa

SEQ ID NO: 5045 - RNA, 20 nt, synthetic construct
  source 1..20: mol_type = other RNA
tactttcaaatattaaaaat

SEQ ID NO: 5046 - RNA, 20 nt, synthetic construct
  source 1..20: mol_type = other RNA
aaatattaaaaattggttga

SEQ ID NO: 5047 - RNA, 20 nt, synthetic construct
  source 1..20: mol_type = other RNA
aatattaaaaattggttgaa

SEQ ID NO: 5048 - RNA, 20 nt, synthetic construct
  source 1..20: mol_type = other RNA
ttaaaaattggttgaagggt

SEQ ID NO: 5049 - RNA, 20 nt, synthetic construct
  source 1..20: mol_type = other RNA
taaaaattggttgaagggtt

SEQ ID NO: 5050 - RNA, 20 nt, synthetic construct
  source 1..20: mol_type = other RNA
aaaaattggttgaagggttg

SEQ ID NO: 5051 - RNA, 20 nt, synthetic construct
  source 1..20: mol_type = other RNA
tggttgaagggttggggatg

SEQ ID NO: 5052 - RNA, 20 nt, synthetic construct
  source 1..20: mol_type = other RNA
gggttggggatgtggctcag

SEQ ID NO: 5053 - RNA, 20 nt, synthetic construct
  source 1..20: mol_type = other RNA
gactcatgaaggctgggcag

SEQ ID NO: 5054 - RNA, 20 nt, synthetic construct
  source 1..20: mol_type = other RNA
ggactcatgaaggctgggca

SEQ ID NO: 5055 - RNA, 20 nt, synthetic construct
  source 1..20: mol_type = other RNA
gggactcatgaaggctgggc

SEQ ID NO: 5056 - RNA, 20 nt, synthetic construct
  source 1..20: mol_type = other RNA
ctcagggactcatgaaggct

SEQ ID NO: 5057 - RNA, 20 nt, synthetic construct
  source 1..20: mol_type = other RNA
actcagggactcatgaaggc

SEQ ID NO: 5058 - RNA, 20 nt, synthetic construct
  source 1..20: mol_type = other RNA
tttaactcagggactcatga

SEQ ID NO: 5059 - RNA, 20 nt, synthetic construct
  source 1..20: mol_type = other RNA
gcttctgggaatttaactca

SEQ ID NO: 5060 - RNA, 20 nt, synthetic construct
  source 1..20: mol_type = other RNA
tgcttctgggaatttaactc

SEQ ID NO: 5061 - RNA, 20 nt, synthetic construct
  source 1..20: mol_type = other RNA
gtttgtcttatactgcttct

SEQ ID NO: 5062 - RNA, 20 nt, synthetic construct
  source 1..20: mol_type = other RNA
tgtttgtcttatactgcttc

SEQ ID NO: 5063 - RNA, 20 nt, synthetic construct
  source 1..20: mol_type = other RNA
accttacttcatccattttc

SEQ ID NO: 5064 - RNA, 20 nt, synthetic construct
  source 1..20: mol_type = other RNA
gccagaaaatggatgaagta

SEQ ID NO: 5065 - RNA, 20 nt, synthetic construct
  source 1..20: mol_type = other RNA
tgtgtagctatgccagaaaa

SEQ ID NO: 5066 - RNA, 20 nt, synthetic construct
  source 1..20: mol_type = other RNA
catacctgcaatcctagttc

SEQ ID NO: 5067 - RNA, 20 nt, synthetic construct
  source 1..20: mol_type = other RNA
ttgtccagaactaggattgc

SEQ ID NO: 5068 - RNA, 20 nt, synthetic construct
  source 1..20: mol_type = other RNA
gcttgaatttgtccagaact

SEQ ID NO: 5069 - RNA, 20 nt, synthetic construct
  source 1..20: mol_type = other RNA
agttctggacaaattcaagc

SEQ ID NO: 5070 - RNA, 20 nt, synthetic construct
  source 1..20: mol_type = other RNA
aatgccaacctcagctactt

SEQ ID NO: 5071 - RNA, 20 nt, synthetic construct
  source 1..20: mol_type = other RNA
caaacctaagtagctgaggt

SEQ ID NO: 5072 - RNA, 20 nt, synthetic construct
  source 1..20: mol_type = other RNA
caacctcagctacttaggtt

SEQ ID NO: 5073 - RNA, 20 nt, synthetic construct
  source 1..20: mol_type = other RNA
aacctcagctacttaggttt

SEQ ID NO: 5074 - RNA, 20 nt, synthetic construct
  source 1..20: mol_type = other RNA
agcccaaacctaagtagctg

SEQ ID NO: 5075 - RNA, 20 nt, synthetic construct
  source 1..20: mol_type = other RNA
ctgagaccctgtcttaacat

SEQ ID NO: 5076 - RNA, 20 nt, synthetic construct
  source 1..20: mol_type = other RNA
tgagaccctgtcttaacatt

SEQ ID NO: 5077 - RNA, 20 nt, synthetic construct
  source 1..20: mol_type = other RNA
gagaccctgtcttaacattg

SEQ ID NO: 5078 - RNA, 20 nt, synthetic construct
  source 1..20: mol_type = other RNA
agaccctgtcttaacattgg

SEQ ID NO: 5079 - RNA, 20 nt, synthetic construct
  source 1..20: mol_type = other RNA
tctcccccaatgttaagaca

SEQ ID NO: 5080 - RNA, 20 nt, synthetic construct
  source 1..20: mol_type = other RNA
ctctcccccaatgttaagac

SEQ ID NO: 5081 - RNA, 20 nt, synthetic construct
  source 1..20: mol_type = other RNA
ttaacattgggggagagcct

SEQ ID NO: 5082 - RNA, 20 nt, synthetic construct
  source 1..20: mol_type = other RNA
attgggggagagcctaggct

SEQ ID NO: 5083 - RNA, 20 nt, synthetic construct
  source 1..20: mol_type = other RNA
tgtatagctcagcctagcct

SEQ ID NO: 5084 - RNA, 20 nt, synthetic construct
  source 1..20: mol_type = other RNA
ctatacagtaagcctctgtc

SEQ ID NO: 5085 - RNA, 20 nt, synthetic construct
  source 1..20: mol_type = other RNA
tatacagtaagcctctgtct

SEQ ID NO: 5086 - RNA, 20 nt, synthetic construct
  source 1..20: mol_type = other RNA
cagtaagcctctgtctggga

SEQ ID NO: 5087 - RNA, 20 nt, synthetic construct
  source 1..20: mol_type = other RNA
taagcctctgtctgggaagg

SEQ ID NO: 5088 - RNA, 20 nt, synthetic construct
  source 1..20: mol_type = other RNA
aagcctctgtctgggaagga

SEQ ID NO: 5089 - RNA, 20 nt, synthetic construct
  source 1..20: mol_type = other RNA
tttccctccttcccagacag

SEQ ID NO: 5090 - RNA, 20 nt, synthetic construct
  source 1..20: mol_type = other RNA
tgtctgggaaggagggaaaa

SEQ ID NO: 5091 - RNA, 20 nt, synthetic construct
  source 1..20: mol_type = other RNA
tgggaaggagggaaaaagga

SEQ ID NO: 5092 - RNA, 20 nt, synthetic construct
  source 1..20: mol_type = other RNA
gaaaaaggaaggaaagacat

SEQ ID NO: 5093 - RNA, 20 nt, synthetic construct
  source 1..20: mol_type = other RNA
gacattggttgaatgacttg

SEQ ID NO: 5094 - RNA, 20 nt, synthetic construct
  source 1..20: mol_type = other RNA
acattggttgaatgacttgt

SEQ ID NO: 5095 - RNA, 20 nt, synthetic construct
  source 1..20: mol_type = other RNA
actgtatgtttagagtgttc

SEQ ID NO: 5096 - RNA, 20 nt, synthetic construct
  source 1..20: mol_type = other RNA
ctgtatgtttagagtgttca

SEQ ID NO: 5097 - RNA, 20 nt, synthetic construct
  source 1..20: mol_type = other RNA
gtttagagtgttcagggaaa

SEQ ID NO: 5098 - RNA, 20 nt, synthetic construct
  source 1..20: mol_type = other RNA
tagagtgttcagggaaaagg

SEQ ID NO: 5099 - RNA, 20 nt, synthetic construct
  source 1..20: mol_type = other RNA
aggtcatttgcagagcagag

SEQ ID NO: 5100 - RNA, 20 nt, synthetic construct
  source 1..20: mol_type = other RNA
attcgtcttatctgagtggc

SEQ ID NO: 5101 - RNA, 20 nt, synthetic construct
  source 1..20: mol_type = other RNA
gtgtattcgtcttatctgag

SEQ ID NO: 5102 - RNA, 20 nt, synthetic construct
  source 1..20: mol_type = other RNA
catgaatatagaagaaacag

SEQ ID NO: 5103 - RNA, 20 nt, synthetic construct
  source 1..20: mol_type = other RNA
aataaaagacacaagactgc

SEQ ID NO: 5104 - RNA, 20 nt, synthetic construct
  source 1..20: mol_type = other RNA
ctaataatatttctagtgtc

SEQ ID NO: 5105 - RNA, 20 nt, synthetic construct
  source 1..20: mol_type = other RNA
cttgagattttattttcaca

SEQ ID NO: 5106 - RNA, 20 nt, synthetic construct
  source 1..20: mol_type = other RNA
cttgtgaaaataaaatctca

SEQ ID NO: 5107 - RNA, 20 nt, synthetic construct
  source 1..20: mol_type = other RNA
aataaaatctcaaggtcata

SEQ ID NO: 5108 - RNA, 20 nt, synthetic construct
  source 1..20: mol_type = other RNA
tacggcaaacacaaagaaac

SEQ ID NO: 5109 - RNA, 20 nt, synthetic construct
  source 1..20: mol_type = other RNA
gtcttcagacactccagaag

SEQ ID NO: 5110 - RNA, 20 nt, synthetic construct
  source 1..20: mol_type = other RNA
tcttcagacactccagaaga

SEQ ID NO: 5111 - RNA, 20 nt, synthetic construct
  source 1..20: mol_type = other RNA
cgagatctgatgccctcttc

SEQ ID NO: 5112 - RNA, 20 nt, synthetic construct
  source 1..20: mol_type = other RNA
gagggcatcagatctcgtta

SEQ ID NO: 5113 - RNA, 20 nt, synthetic construct
  source 1..20: mol_type = other RNA
gcatcagatctcgttacgga

SEQ ID NO: 5114 - RNA, 20 nt, synthetic construct
  source 1..20: mol_type = other RNA
gatggttgtgagccaccatg

SEQ ID NO: 5115 - RNA, 20 nt, synthetic construct
  source 1..20: mol_type = other RNA
gtgagccaccatgtggttgc

SEQ ID NO: 5116 - RNA, 20 nt, synthetic construct
  source 1..20: mol_type = other RNA
tgagccaccatgtggttgct

SEQ ID NO: 5117 - RNA, 20 nt, synthetic construct
  source 1..20: mol_type = other RNA
aaatcccagcaaccacatgg

SEQ ID NO: 5118 - RNA, 20 nt, synthetic construct
  source 1..20: mol_type = other RNA
ttcaaatcccagcaaccaca

SEQ ID NO: 5119 - RNA, 20 nt, synthetic construct
  source 1..20: mol_type = other RNA
ggatttgaacttcagacctt

SEQ ID NO: 5120 - RNA, 20 nt, synthetic construct
  source 1..20: mol_type = other RNA
cagaccttcggaagagcagt

SEQ ID NO: 5121 - RNA, 20 nt, synthetic construct
  source 1..20: mol_type = other RNA
agaccttcggaagagcagtc

SEQ ID NO: 5122 - RNA, 20 nt, synthetic construct
  source 1..20: mol_type = other RNA
gcacccgactgctcttccga

SEQ ID NO: 5123 - RNA, 20 nt, synthetic construct
  source 1..20: mol_type = other RNA
ggctggtgagatggctcagt

SEQ ID NO: 5124 - RNA, 20 nt, synthetic construct
  source 1..20: mol_type = other RNA
gggctggtgagatggctcag

SEQ ID NO: 5125 - RNA, 20 nt, synthetic construct
  source 1..20: mol_type = other RNA
tgagccatctcaccagcccc

SEQ ID NO: 5126 - RNA, 20 nt, synthetic construct
  source 1..20: mol_type = other RNA
aaaacctggggctggtgaga

SEQ ID NO: 5127 - RNA, 20 nt, synthetic construct
  source 1..20: mol_type = other RNA
agaaaaaaaaaacctggggc

SEQ ID NO: 5128 - RNA, 20 nt, synthetic construct
  source 1..20: mol_type = other RNA
actaagaaaaaaaaaacctg

SEQ ID NO: 5129 - RNA, 20 nt, synthetic construct
  source 1..20: mol_type = other RNA
aactaagaaaaaaaaaacct

SEQ ID NO: 5130 - RNA, 20 nt, synthetic construct
  source 1..20: mol_type = other RNA
caactaagaaaaaaaaaacc

SEQ ID NO: 5131 - RNA, 20 nt, synthetic construct
  source 1..20: mol_type = other RNA
tattgttattcttttgagac

SEQ ID NO: 5132 - RNA, 20 nt, synthetic construct
  source 1..20: mol_type = other RNA
aggatcccacactgaaactc

SEQ ID NO: 5133 - RNA, 20 nt, synthetic construct
  source 1..20: mol_type = other RNA
gctagcctgagtttcagtgt

SEQ ID NO: 5134 - RNA, 20 nt, synthetic construct
  source 1..20: mol_type = other RNA
ggctagcctgagtttcagtg

SEQ ID NO: 5135 - RNA, 20 nt, synthetic construct
  source 1..20: mol_type = other RNA
ggctagccttcaatttccta

SEQ ID NO: 5136 - RNA, 20 nt, synthetic construct
  source 1..20: mol_type = other RNA
tcaaatccataggaaattga

SEQ ID NO: 5137 - RNA, 20 nt, synthetic construct
  source 1..20: mol_type = other RNA
tgctatgaggtcaaatccat

SEQ ID NO: 5138 - RNA, 20 nt, synthetic construct
  source 1..20: mol_type = other RNA
gaaactggctgactgctatg

SEQ ID NO: 5139 - RNA, 20 nt, synthetic construct
  source 1..20: mol_type = other RNA
agcactcagaaggtggaaac

SEQ ID NO: 5140 - RNA, 20 nt, synthetic construct
  source 1..20: mol_type = other RNA
aaatcttagcactcagaagg

SEQ ID NO: 5141 - RNA, 20 nt, synthetic construct
  source 1..20: mol_type = other RNA
ttgaaatcttagcactcaga

SEQ ID NO: 5142 - RNA, 20 nt, synthetic construct
  source 1..20: mol_type = other RNA
ggaattgggtgtggtggctc

SEQ ID NO: 5143 - RNA, 20 nt, synthetic construct
  source 1..20: mol_type = other RNA
atcttaggaattgggtgtgg

SEQ ID NO: 5144 - RNA, 20 nt, synthetic construct
  source 1..20: mol_type = other RNA
catatcttaggaattgggtg

SEQ ID NO: 5145 - RNA, 20 nt, synthetic construct
  source 1..20: mol_type = other RNA
aaaaacatatcttaggaatt

SEQ ID NO: 5146 - RNA, 20 nt, synthetic construct
  source 1..20: mol_type = other RNA
taaaaacatatcttaggaat

SEQ ID NO: 5147 - RNA, 20 nt, synthetic construct
  source 1..20: mol_type = other RNA
cttgcttaaaaacatatctt

SEQ ID NO: 5148 - RNA, 20 nt, synthetic construct
  source 1..20: mol_type = other RNA
ctaagatatgtttttaagca

SEQ ID NO: 5149 - RNA, 20 nt, synthetic construct
  source 1..20: mol_type = other RNA
atgtttttaagcaaggttat

SEQ ID NO: 5150 - RNA, 20 nt, synthetic construct
  source 1..20: mol_type = other RNA
cacgtcattgcaaagggtta

SEQ ID NO: 5151 - RNA, 20 nt, synthetic construct
  source 1..20: mol_type = other RNA
accctttgcaatgacgtgtc

SEQ ID NO: 5152 - RNA, 20 nt, synthetic construct
  source 1..20: mol_type = other RNA
tcctgacacgtcattgcaaa

SEQ ID NO: 5153 - RNA, 20 nt, synthetic construct
  source 1..20: mol_type = other RNA
ttcctgacacgtcattgcaa

SEQ ID NO: 5154 - RNA, 20 nt, synthetic construct
  source 1..20: mol_type = other RNA
gacaactggaaaaaaaaaaa

SEQ ID NO: 5155 - RNA, 20 nt, synthetic construct
  source 1..20: mol_type = other RNA
tttttttttttccagttgtc

SEQ ID NO: 5156 - RNA, 20 nt, synthetic construct
  source 1..20: mol_type = other RNA
ttttttccagttgtcaggcc

SEQ ID NO: 5157 - RNA, 20 nt, synthetic construct
  source 1..20: mol_type = other RNA
ccagttgtcaggcctggcaa

SEQ ID NO: 5158 - RNA, 20 nt, synthetic construct
  source 1..20: mol_type = other RNA
ccattgccaggcctgacaac

SEQ ID NO: 5159 - RNA, 20 nt, synthetic construct
  source 1..20: mol_type = other RNA
caggcctggcaatggagccc

SEQ ID NO: 5160 - RNA, 20 nt, synthetic construct
  source 1..20: mol_type = other RNA
aggcctggcaatggagccca

SEQ ID NO: 5161 - RNA, 20 nt, synthetic construct
  source 1..20: mol_type = other RNA
gggccctgggctccattgcc

SEQ ID NO: 5162 - RNA, 20 nt, synthetic construct
  source 1..20: mol_type = other RNA
tttagcaagcacagggccct

SEQ ID NO: 5163 - RNA, 20 nt, synthetic construct
  source 1..20: mol_type = other RNA
gtttagcaagcacagggccc

SEQ ID NO: 5164 - RNA, 20 nt, synthetic construct
  source 1..20: mol_type = other RNA
gccctgtgcttgctaaacga

SEQ ID NO: 5165 - RNA, 20 nt, synthetic construct
  source 1..20: mol_type = other RNA
gccatcgtttagcaagcaca

SEQ ID NO: 5166 - RNA, 20 nt, synthetic construct
  source 1..20: mol_type = other RNA
agccatcgtttagcaagcac

SEQ ID NO: 5167 - RNA, 20 nt, synthetic construct
  source 1..20: mol_type = other RNA
gctgggtatatataacttag

SEQ ID NO: 5168 - RNA, 20 nt, synthetic construct
  source 1..20: mol_type = other RNA
agctgggtatatataactta

SEQ ID NO: 5169 - RNA, 20 nt, synthetic construct
  source 1..20: mol_type = other RNA
aagctgggtatatataactt

SEQ ID NO: 5170 - RNA, 20 nt, synthetic construct
  source 1..20: mol_type = other RNA
atatatacccagcttatccc

SEQ ID NO: 5171 - RNA, 20 nt, synthetic construct
  source 1..20: mol_type = other RNA
gaaagatcctgggataagct

SEQ ID NO: 5172 - RNA, 20 nt, synthetic construct
  source 1..20: mol_type = other RNA
agaaagatcctgggataagc

SEQ ID NO: 5173 - RNA, 20 nt, synthetic construct
  source 1..20: mol_type = other RNA
gaaagtctgagaaagatcct

SEQ ID NO: 5174 - RNA, 20 nt, synthetic construct
  source 1..20: mol_type = other RNA
agaaagtctgagaaagatcc

SEQ ID NO: 5175 - RNA, 20 nt, synthetic construct
  source 1..20: mol_type = other RNA
ctatcgatgttgcttctctt

SEQ ID NO: 5176 - RNA, 20 nt, synthetic construct
  source 1..20: mol_type = other RNA
ctttttgtgagaaaagagca

SEQ ID NO: 5177 - RNA, 20 nt, synthetic construct
  source 1..20: mol_type = other RNA
tctaagcaagaacccttgtc

SEQ ID NO: 5178 - RNA, 20 nt, synthetic construct
  source 1..20: mol_type = other RNA
atctctctgactccagacaa

SEQ ID NO: 5179 - RNA, 20 nt, synthetic construct
  source 1..20: mol_type = other RNA
tatctctctgactccagaca

SEQ ID NO: 5180 - RNA, 20 nt, synthetic construct
  source 1..20: mol_type = other RNA
gtcagagagatagcttagtc

SEQ ID NO: 5181 - RNA, 20 nt, synthetic construct
  source 1..20: mol_type = other RNA
tttaaacaagaaaagttctg

SEQ ID NO: 5182 - RNA, 20 nt, synthetic construct
  source 1..20: mol_type = other RNA
ttttaaacaagaaaagttct

SEQ ID NO: 5183 - RNA, 20 nt, synthetic construct
  source 1..20: mol_type = other RNA
tttttaaacaagaaaagttc

SEQ ID NO: 5184 - RNA, 20 nt, synthetic construct
  source 1..20: mol_type = other RNA
caaacaaacaaacaaaaact

SEQ ID NO: 5185 - RNA, 20 nt, synthetic construct
  source 1..20: mol_type = other RNA
caaaaactaggcatgacagc

SEQ ID NO: 5186 - RNA, 20 nt, synthetic construct
  source 1..20: mol_type = other RNA
actaggcatgacagctggag

SEQ ID NO: 5187 - RNA, 20 nt, synthetic construct
  source 1..20: mol_type = other RNA
aggcatgacagctggagagg

SEQ ID NO: 5188 - RNA, 20 nt, synthetic construct
  source 1..20: mol_type = other RNA
attaacagcacttgttaaag

SEQ ID NO: 5189 - RNA, 20 nt, synthetic construct
  source 1..20: mol_type = other RNA
tgttaaagaggacctcagct

SEQ ID NO: 5190 - RNA, 20 nt, synthetic construct
  source 1..20: mol_type = other RNA
aggacctcagcttggttccc

SEQ ID NO: 5191 - RNA, 20 nt, synthetic construct
  source 1..20: mol_type = other RNA
ggacctcagcttggttccca

SEQ ID NO: 5192 - RNA, 20 nt, synthetic construct
  source 1..20: mol_type = other RNA
gagccctgggaaccaagctg

SEQ ID NO: 5193 - RNA, 20 nt, synthetic construct
  source 1..20: mol_type = other RNA
aactggagttatagagccct

SEQ ID NO: 5194 - RNA, 20 nt, synthetic construct
  source 1..20: mol_type = other RNA
gaactggagttatagagccc

SEQ ID NO: 5195 - RNA, 20 nt, synthetic construct
  source 1..20: mol_type = other RNA
ggctctataactccagttcc

SEQ ID NO: 5196 - RNA, 20 nt, synthetic construct
  source 1..20: mol_type = other RNA
gctctataactccagttcca

SEQ ID NO: 5197 - RNA, 20 nt, synthetic construct
  source 1..20: mol_type = other RNA
gctgtctgaggccctggaac

SEQ ID NO: 5198 - RNA, 20 nt, synthetic construct
  source 1..20: mol_type = other RNA
caggaggctgtctgaggccc

SEQ ID NO: 5199 - RNA, 20 nt, synthetic construct
  source 1..20: mol_type = other RNA
aggctacaggaggctgtctg

SEQ ID NO: 5200 - RNA, 20 nt, synthetic construct
  source 1..20: mol_type = other RNA
atgcatgaagaggctacagg

SEQ ID NO: 5201 - RNA, 20 nt, synthetic construct
  source 1..20: mol_type = other RNA
ctgatgcatgaagaggctac

SEQ ID NO: 5202 - RNA, 20 nt, synthetic construct
  source 1..20: mol_type = other RNA
gcctcttcatgcatcagaca

SEQ ID NO: 5203 - RNA, 20 nt, synthetic construct
  source 1..20: mol_type = other RNA
accatgtctgatgcatgaag

SEQ ID NO: 5204 - RNA, 20 nt, synthetic construct
  source 1..20: mol_type = other RNA
gacatggtccatatgcatgc

SEQ ID NO: 5205 - RNA, 20 nt, synthetic construct
  source 1..20: mol_type = other RNA
gtgtttgacctgcatgcata

SEQ ID NO: 5206 - RNA, 20 nt, synthetic construct
  source 1..20: mol_type = other RNA
aaaaataaaagtctaaaaaa

SEQ ID NO: 5207 - RNA, 20 nt, synthetic construct
  source 1..20: mol_type = other RNA
catgctataatcccagtgct

SEQ ID NO: 5208 - RNA, 20 nt, synthetic construct
  source 1..20: mol_type = other RNA
atgctataatcccagtgcta

SEQ ID NO: 5209 - RNA, 20 nt, synthetic construct
  source 1..20: mol_type = other RNA
ctataatcccagtgctaggg

SEQ ID NO: 5210 - RNA, 20 nt, synthetic construct
  source 1..20: mol_type = other RNA
acatttgcctccctagcact

SEQ ID NO: 5211 - RNA, 20 nt, synthetic construct
  source 1..20: mol_type = other RNA
gacatttgcctccctagcac

SEQ ID NO: 5212 - RNA, 20 nt, synthetic construct
  source 1..20: mol_type = other RNA
gtgctagggaggcaaatgtc

SEQ ID NO: 5213 - RNA, 20 nt, synthetic construct
  source 1..20: mol_type = other RNA
ggcaaatgtctggaccttgt

SEQ ID NO: 5214 - RNA, 20 nt, synthetic construct
  source 1..20: mol_type = other RNA
aatgtctggaccttgtcggt

SEQ ID NO: 5215 - RNA, 20 nt, synthetic construct
  source 1..20: mol_type = other RNA
gactgactggccgaccgaca

SEQ ID NO: 5216 - RNA, 20 nt, synthetic construct
  source 1..20: mol_type = other RNA
tgactggctggctgactgac

SEQ ID NO: 5217 - RNA, 20 nt, synthetic construct
  source 1..20: mol_type = other RNA
gctaggctagactgactggc

SEQ ID NO: 5218 - RNA, 20 nt, synthetic construct
  source 1..20: mol_type = other RNA
ctatgctaggctagactgac

SEQ ID NO: 5219 - RNA, 20 nt, synthetic construct
  source 1..20: mol_type = other RNA
ctagcctagcatagcctact

SEQ ID NO: 5220 - RNA, 20 nt, synthetic construct
  source 1..20: mol_type = other RNA
cacacctagtaggctatgct

SEQ ID NO: 5221 - RNA, 20 nt, synthetic construct
  source 1..20: mol_type = other RNA
tgggctggagcacacctagt

SEQ ID NO: 5222 - RNA, 20 nt, synthetic construct
  source 1..20: mol_type = other RNA
gacaaggtctctcattgggc

SEQ ID NO: 5223 - RNA, 20 nt, synthetic construct
  source 1..20: mol_type = other RNA
tagagacaaggtctctcatt

SEQ ID NO: 5224 - RNA, 20 nt, synthetic construct
  source 1..20: mol_type = other RNA
ttagagacaaggtctctcat

SEQ ID NO: 5225 - RNA, 20 nt, synthetic construct
  source 1..20: mol_type = other RNA
agaccttgtctctaaaaaaa

SEQ ID NO: 5226 - RNA, 20 nt, synthetic construct
  source 1..20: mol_type = other RNA
gaccttgtctctaaaaaaaa

SEQ ID NO: 5227 - RNA, 20 nt, synthetic construct
  source 1..20: mol_type = other RNA
tacccttttttttagagaca

SEQ ID NO: 5228 - RNA, 20 nt, synthetic construct
  source 1..20: mol_type = other RNA
ggtagaaagaaaagacaaaa

SEQ ID NO: 5229 - RNA, 20 nt, synthetic construct
  source 1..20: mol_type = other RNA
gacaaaatggatgtctcctg

SEQ ID NO: 5230 - RNA, 20 nt, synthetic construct
  source 1..20: mol_type = other RNA
ctcctgaggaatgataccca

SEQ ID NO: 5231 - RNA, 20 nt, synthetic construct
  source 1..20: mol_type = other RNA
atccgtgggtatcattcctc

SEQ ID NO: 5232 - RNA, 20 nt, synthetic construct
  source 1..20: mol_type = other RNA
ggacaattgtgggtatccgt

SEQ ID NO: 5233 - RNA, 20 nt, synthetic construct
  source 1..20: mol_type = other RNA
aggacaattgtgggtatccg

SEQ ID NO: 5234 - RNA, 20 nt, synthetic construct
  source 1..20: mol_type = other RNA
ggatacccacaattgtcctc

SEQ ID NO: 5235 - RNA, 20 nt, synthetic construct
  source 1..20: mol_type = other RNA
ggagaccagaggacaattgt

SEQ ID NO: 5236 - RNA, 20 nt, synthetic construct
  source 1..20: mol_type = other RNA
cggagaccagaggacaattg

SEQ ID NO: 5237 - RNA, 20 nt, synthetic construct
  source 1..20: mol_type = other RNA
gtattgcacacggagaccag

SEQ ID NO: 5238 - RNA, 20 nt, synthetic construct
  source 1..20: mol_type = other RNA
acatgggtttgtattgcaca

SEQ ID NO: 5239 - RNA, 20 nt, synthetic construct
  source 1..20: mol_type = other RNA
tgttgcaaatattcagacat

SEQ ID NO: 5240 - RNA, 20 nt, synthetic construct
  source 1..20: mol_type = other RNA
ctgttgcaaatattcagaca

SEQ ID NO: 5241 - RNA, 20 nt, synthetic construct
  source 1..20: mol_type = other RNA
catgtctgaatatttgcaac

SEQ ID NO: 5242 - RNA, 20 nt, synthetic construct
  source 1..20: mol_type = other RNA
atgtctgaatatttgcaaca

SEQ ID NO: 5243 - RNA, 20 nt, synthetic construct
  source 1..20: mol_type = other RNA
agcacagctttactagatga

SEQ ID NO: 5244 - RNA, 20 nt, synthetic construct
  source 1..20: mol_type = other RNA
aagcacagctttactagatg

SEQ ID NO: 5245 - RNA, 20 nt, synthetic construct
  source 1..20: mol_type = other RNA
catctagtaaagctgtgctt

SEQ ID NO: 5246 - RNA, 20 nt, synthetic construct
  source 1..20: mol_type = other RNA
gaaaaataagacagatggga

SEQ ID NO: 5247 - RNA, 20 nt, synthetic construct
  source 1..20: mol_type = other RNA
agaaaaataagacagatggg

SEQ ID NO: 5248 - RNA, 20 nt, synthetic construct
  source 1..20: mol_type = other RNA
agtagaaaaataagacagat

SEQ ID NO: 5249 - RNA, 20 nt, synthetic construct
  source 1..20: mol_type = other RNA
cagtagaaaaataagacaga

SEQ ID NO: 5250 - RNA, 20 nt, synthetic construct
  source 1..20: mol_type = other RNA
catctgtcttatttttctac

SEQ ID NO: 5251 - RNA, 20 nt, synthetic construct
  source 1..20: mol_type = other RNA
atttttctactggtgtgcta

SEQ ID NO: 5252 - RNA, 20 nt, synthetic construct
  source 1..20: mol_type = other RNA
gtgctaaggcaccatgacca

SEQ ID NO: 5253 - RNA, 20 nt, synthetic construct
  source 1..20: mol_type = other RNA
tctctaagttgccttggtca

SEQ ID NO: 5254 - RNA, 20 nt, synthetic construct
  source 1..20: mol_type = other RNA
tcttcttctctaagttgcct

SEQ ID NO: 5255 - RNA, 20 nt, synthetic construct
  source 1..20: mol_type = other RNA
gaagaagaaacagtttattg

SEQ ID NO: 5256 - RNA, 20 nt, synthetic construct
  source 1..20: mol_type = other RNA
aagaagaaacagtttattga

SEQ ID NO: 5257 - RNA, 20 nt, synthetic construct
  source 1..20: mol_type = other RNA
ttgagggtttatagttatag

SEQ ID NO: 5258 - RNA, 20 nt, synthetic construct
  source 1..20: mol_type = other RNA
tgagggtttatagttataga

SEQ ID NO: 5259 - RNA, 20 nt, synthetic construct
  source 1..20: mol_type = other RNA
gtttatagttatagagggta

SEQ ID NO: 5260 - RNA, 20 nt, synthetic construct
  source 1..20: mol_type = other RNA
tagttatagagggtaaggca

SEQ ID NO: 5261 - RNA, 20 nt, synthetic construct
  source 1..20: mol_type = other RNA
tagagggtaaggcaaggact

SEQ ID NO: 5262 - RNA, 20 nt, synthetic construct
  source 1..20: mol_type = other RNA
taaggcaaggacttggtagc

SEQ ID NO: 5263 - RNA, 20 nt, synthetic construct
  source 1..20: mol_type = other RNA
gcaaggacttggtagcaggc

SEQ ID NO: 5264 - RNA, 20 nt, synthetic construct
  source 1..20: mol_type = other RNA
ggacttggtagcaggcaggc

SEQ ID NO: 5265 - RNA, 20 nt, synthetic construct
  source 1..20: mol_type = other RNA
ttggtagcaggcaggcaggc

SEQ ID NO: 5266 - RNA, 20 nt, synthetic construct
  source 1..20: mol_type = other RNA
agcaggcaggcaggcaggca

SEQ ID NO: 5267 - RNA, 20 nt, synthetic construct
  source 1..20: mol_type = other RNA
caggcaggcaggcatggtac

SEQ ID NO: 5268 - RNA, 20 nt, synthetic construct
  source 1..20: mol_type = other RNA
catggtactggtgtagtagc

SEQ ID NO: 5269 - RNA, 20 nt, synthetic construct
  source 1..20: mol_type = other RNA
atggtactggtgtagtagct

SEQ ID NO: 5270 - RNA, 20 nt, synthetic construct
  source 1..20: mol_type = other RNA
ggagcttgtatcttgagaca

SEQ ID NO: 5271 - RNA, 20 nt, synthetic construct
  source 1..20: mol_type = other RNA
aaagctgagagatagctaag

SEQ ID NO: 5272 - RNA, 20 nt, synthetic construct
  source 1..20: mol_type = other RNA
aagctgagagatagctaagt

SEQ ID NO: 5273 - RNA, 20 nt, synthetic construct
  source 1..20: mol_type = other RNA
gagagatagctaagtgggcc

SEQ ID NO: 5274 - RNA, 20 nt, synthetic construct
  source 1..20: mol_type = other RNA
aggtttcaaaagctcacacc

SEQ ID NO: 5275 - RNA, 20 nt, synthetic construct
  source 1..20: mol_type = other RNA
tttcactggggacagctttg

SEQ ID NO: 5276 - RNA, 20 nt, synthetic construct
  source 1..20: mol_type = other RNA
ttgatggaggcatttcactg

SEQ ID NO: 5277 - RNA, 20 nt, synthetic construct
  source 1..20: mol_type = other RNA
gttgatggaggcatttcact

SEQ ID NO: 5278 - RNA, 20 nt, synthetic construct
  source 1..20: mol_type = other RNA
tgttgatggaggcatttcac

SEQ ID NO: 5279 - RNA, 20 nt, synthetic construct
  source 1..20: mol_type = other RNA
gtgaaatgcctccatcaaca

SEQ ID NO: 5280 - RNA, 20 nt, synthetic construct
  source 1..20: mol_type = other RNA
aggtgtggccttgttgatgg

SEQ ID NO: 5281 - RNA, 20 nt, synthetic construct
  source 1..20: mol_type = other RNA
gttaggtgtggccttgttga

SEQ ID NO: 5282 - RNA, 20 nt, synthetic construct
  source 1..20: mol_type = other RNA
tgtttgggaagggttaggtg

SEQ ID NO: 5283 - RNA, 20 nt, synthetic construct
  source 1..20: mol_type = other RNA
agaactgtttgggaagggtt

SEQ ID NO: 5284 - RNA, 20 nt, synthetic construct
  source 1..20: mol_type = other RNA
ttggtagaactgtttgggaa

SEQ ID NO: 5285 - RNA, 20 nt, synthetic construct
  source 1..20: mol_type = other RNA
gttggtagaactgtttggga

SEQ ID NO: 5286 - RNA, 20 nt, synthetic construct
  source 1..20: mol_type = other RNA
tcccaaacagttctaccaac

SEQ ID NO: 5287 - RNA, 20 nt, synthetic construct
  source 1..20: mol_type = other RNA
cccaaacagttctaccaact

SEQ ID NO: 5288 - RNA, 20 nt, synthetic construct
  source 1..20: mol_type = other RNA
cccagttggtagaactgttt

SEQ ID NO: 5289 - RNA, 20 nt, synthetic construct
  source 1..20: mol_type = other RNA
tcccagttggtagaactgtt

SEQ ID NO: 5290 - RNA, 20 nt, synthetic construct
  source 1..20: mol_type = other RNA
atgaatgcttggttcccagt

SEQ ID NO: 5291 - RNA, 20 nt, synthetic construct
  source 1..20: mol_type = other RNA
ctgaggctcatatgaatgct

SEQ ID NO: 5292 - RNA, 20 nt, synthetic construct
  source 1..20: mol_type = other RNA
caagcattcatatgagcctc

SEQ ID NO: 5293 - RNA, 20 nt, synthetic construct
  source 1..20: mol_type = other RNA
aagcattcatatgagcctca

SEQ ID NO: 5294 - RNA, 20 nt, synthetic construct
  source 1..20: mol_type = other RNA
agcattcatatgagcctcag

SEQ ID NO: 5295 - RNA, 20 nt, synthetic construct
  source 1..20: mol_type = other RNA
tgaatgagactgctcccctg

SEQ ID NO: 5296 - RNA, 20 nt, synthetic construct
  source 1..20: mol_type = other RNA
gtactcagtacactgcccca

SEQ ID NO: 5297 - RNA, 20 nt, synthetic construct
  source 1..20: mol_type = other RNA
tactcagtacactgccccat

SEQ ID NO: 5298 - RNA, 20 nt, synthetic construct
  source 1..20: mol_type = other RNA
ttagaggacttctgcccatg

SEQ ID NO: 5299 - RNA, 20 nt, synthetic construct
  source 1..20: mol_type = other RNA
tttagaggacttctgcccat

SEQ ID NO: 5300 - RNA, 20 nt, synthetic construct
  source 1..20: mol_type = other RNA
gtttagaggacttctgccca

SEQ ID NO: 5301 - RNA, 20 nt, synthetic construct
  source 1..20: mol_type = other RNA
atgggcagaagtcctctaaa

SEQ ID NO: 5302 - RNA, 20 nt, synthetic construct
  source 1..20: mol_type = other RNA
acacattagtaaccgtttag

SEQ ID NO: 5303 - RNA, 20 nt, synthetic construct
  source 1..20: mol_type = other RNA
tatccctcaccatacttaga

SEQ ID NO: 5304 - RNA, 20 nt, synthetic construct
  source 1..20: mol_type = other RNA
tttccttctaagtatggtga

SEQ ID NO: 5305 - RNA, 20 nt, synthetic construct
  source 1..20: mol_type = other RNA
gtttccttctaagtatggtg

SEQ ID NO: 5306 - RNA, 20 nt, synthetic construct
  source 1..20: mol_type = other RNA
ggcttgtttccttctaagta

SEQ ID NO: 5307 - RNA, 20 nt, synthetic construct
  source 1..20: mol_type = other RNA
ggaaacaagccatcccaaaa

SEQ ID NO: 5308 - RNA, 20 nt, synthetic construct
  source 1..20: mol_type = other RNA
tcatgctatccattttggga

SEQ ID NO: 5309 - RNA, 20 nt, synthetic construct
  source 1..20: mol_type = other RNA
tgagtcatgctatccatttt

SEQ ID NO: 5310 - RNA, 20 nt, synthetic construct
  source 1..20: mol_type = other RNA
ctgagtcatgctatccattt

SEQ ID NO: 5311 - RNA, 20 nt, synthetic construct
  source 1..20: mol_type = other RNA
ttgctctgggtgaagtacac

SEQ ID NO: 5312 - RNA, 20 nt, synthetic construct
  source 1..20: mol_type = other RNA
tacttcacccagagcaaatg

SEQ ID NO: 5313 - RNA, 20 nt, synthetic construct
  source 1..20: mol_type = other RNA
acccagagcaaatgtggata

SEQ ID NO: 5314 - RNA, 20 nt, synthetic construct
  source 1..20: mol_type = other RNA
accgtatccacatttgctct

SEQ ID NO: 5315 - RNA, 20 nt, synthetic construct
  source 1..20: mol_type = other RNA
caccgtatccacatttgctc

SEQ ID NO: 5316 - RNA, 20 nt, synthetic construct
  source 1..20: mol_type = other RNA
cagagcaaatgtggatacgg

SEQ ID NO: 5317 - RNA, 20 nt, synthetic construct
  source 1..20: mol_type = other RNA
agagcaaatgtggatacggt

SEQ ID NO: 5318 - RNA, 20 nt, synthetic construct
  source 1..20: mol_type = other RNA
gtggatacggtgggaaacag

SEQ ID NO: 5319 - RNA, 20 nt, synthetic construct
  source 1..20: mol_type = other RNA
gggaaacagaggacagtgat

SEQ ID NO: 5320 - RNA, 20 nt, synthetic construct
  source 1..20: mol_type = other RNA
aggacagtgataggacacaa

SEQ ID NO: 5321 - RNA, 20 nt, synthetic construct
  source 1..20: mol_type = other RNA
gtctcagtttctagttcaga

SEQ ID NO: 5322 - RNA, 20 nt, synthetic construct
  source 1..20: mol_type = other RNA
agacataaaccaacacacat

SEQ ID NO: 5323 - RNA, 20 nt, synthetic construct
  source 1..20: mol_type = other RNA
tgtatctttcctatgtgtgt

SEQ ID NO: 5324 - RNA, 20 nt, synthetic construct
  source 1..20: mol_type = other RNA
ataggaaagatacactccac

SEQ ID NO: 5325 - RNA, 20 nt, synthetic construct
  source 1..20: mol_type = other RNA
agatacactccactggacag

SEQ ID NO: 5326 - RNA, 20 nt, synthetic construct
  source 1..20: mol_type = other RNA
gatacactccactggacagt

SEQ ID NO: 5327 - RNA, 20 nt, synthetic construct
  source 1..20: mol_type = other RNA
catgggctcccactgtccag

SEQ ID NO: 5328 - RNA, 20 nt, synthetic construct
  source 1..20: mol_type = other RNA
cagtgggagcccatgcacaa

SEQ ID NO: 5329 - RNA, 20 nt, synthetic construct
  source 1..20: mol_type = other RNA
gcccatgcacaaaggttctt

SEQ ID NO: 5330 - RNA, 20 nt, synthetic construct
  source 1..20: mol_type = other RNA
gccaaagaacctttgtgcat

SEQ ID NO: 5331 - RNA, 20 nt, synthetic construct
  source 1..20: mol_type = other RNA
agccaaagaacctttgtgca

SEQ ID NO: 5332 - RNA, 20 nt, synthetic construct
  source 1..20: mol_type = other RNA
tgacagcagtttcttattat

SEQ ID NO: 5333 - RNA, 20 nt, synthetic construct
  source 1..20: mol_type = other RNA
gacagcagtttcttattatt

SEQ ID NO: 5334 - RNA, 20 nt, synthetic construct
  source 1..20: mol_type = other RNA
gatgagctttgtttctgccc

SEQ ID NO: 5335 - RNA, 20 nt, synthetic construct
  source 1..20: mol_type = other RNA
atgagctttgtttctgccct

SEQ ID NO: 5336 - RNA, 20 nt, synthetic construct
  source 1..20: mol_type = other RNA
ccctgggtgagagtttattt

SEQ ID NO: 5337 - RNA, 20 nt, synthetic construct
  source 1..20: mol_type = other RNA
cctaaataaactctcaccca

SEQ ID NO: 5338 - RNA, 20 nt, synthetic construct
  source 1..20: mol_type = other RNA
tcctaaataaactctcaccc

SEQ ID NO: 5339 - RNA, 20 nt, synthetic construct
  source 1..20: mol_type = other RNA
cacactaagacaaccactga

SEQ ID NO: 5340 - RNA, 20 nt, synthetic construct
  source 1..20: mol_type = other RNA
actttgttctaggccatcag

SEQ ID NO: 5341 - RNA, 20 nt, synthetic construct
  source 1..20: mol_type = other RNA
cagtgctctgactttgttct

SEQ ID NO: 5342 - RNA, 20 nt, synthetic construct
  source 1..20: mol_type = other RNA
agtcagagcactgtgcgttg

SEQ ID NO: 5343 - RNA, 20 nt, synthetic construct
  source 1..20: mol_type = other RNA
cactgtgcgttgtggatctt

SEQ ID NO: 5344 - RNA, 20 nt, synthetic construct
  source 1..20: mol_type = other RNA
gatgctttaatcatcatgaa

SEQ ID NO: 5345 - RNA, 20 nt, synthetic construct
  source 1..20: mol_type = other RNA
actaacacattttaatagga

SEQ ID NO: 5346 - RNA, 20 nt, synthetic construct
  source 1..20: mol_type = other RNA
atggactaacacattttaat

SEQ ID NO: 5347 - RNA, 20 nt, synthetic construct
  source 1..20: mol_type = other RNA
aaaatgtgttagtccatttt

SEQ ID NO: 5348 - RNA, 20 nt, synthetic construct
  source 1..20: mol_type = other RNA
aaatgtgttagtccattttt

SEQ ID NO: 5349 - RNA, 20 nt, synthetic construct
  source 1..20: mol_type = other RNA
aatgtgttagtccatttttg

SEQ ID NO: 5350 - RNA, 20 nt, synthetic construct
  source 1..20: mol_type = other RNA
agtaaacataaccccaaaaa

SEQ ID NO: 5351 - RNA, 20 nt, synthetic construct
  source 1..20: mol_type = other RNA
gggttatgtttactatacaa

SEQ ID NO: 5352 - RNA, 20 nt, synthetic construct
  source 1..20: mol_type = other RNA
ttatgtttactatacaaagg

SEQ ID NO: 5353 - RNA, 20 nt, synthetic construct
  source 1..20: mol_type = other RNA
gtttactatacaaaggtgga

SEQ ID NO: 5354 - RNA, 20 nt, synthetic construct
  source 1..20: mol_type = other RNA
tttactatacaaaggtggaa

SEQ ID NO: 5355 - RNA, 20 nt, synthetic construct
  source 1..20: mol_type = other RNA
ttactatacaaaggtggaag

SEQ ID NO: 5356 - RNA, 20 nt, synthetic construct
  source 1..20: mol_type = other RNA
caaaggtggaaggggttatc

SEQ ID NO: 5357 - RNA, 20 nt, synthetic construct
  source 1..20: mol_type = other RNA
gttatctggccccatcttac

SEQ ID NO: 5358 - RNA, 20 nt, synthetic construct
  source 1..20: mol_type = other RNA
acacagttacctgtaagatg

SEQ ID NO: 5359 - RNA, 20 nt, synthetic construct
  source 1..20: mol_type = other RNA
gacacagttacctgtaagat

SEQ ID NO: 5360 - RNA, 20 nt, synthetic construct
  source 1..20: mol_type = other RNA
ggacacagttacctgtaaga

SEQ ID NO: 5361 - RNA, 20 nt, synthetic construct
  source 1..20: mol_type = other RNA
aggtaactgtgtcccttttg

SEQ ID NO: 5362 - RNA, 20 nt, synthetic construct
  source 1..20: mol_type = other RNA
tggtttttatatccacaaaa

SEQ ID NO: 5363 - RNA, 20 nt, synthetic construct
  source 1..20: mol_type = other RNA
atggtttttatatccacaaa

SEQ ID NO: 5364 - RNA, 20 nt, synthetic construct
  source 1..20: mol_type = other RNA
aataaaattgcagtatctga

SEQ ID NO: 5365 - RNA, 20 nt, synthetic construct
  source 1..20: mol_type = other RNA
tatttttgattatgtgtctg

SEQ ID NO: 5366 - RNA, 20 nt, synthetic construct
  source 1..20: mol_type = other RNA
atttttgattatgtgtctga

SEQ ID NO: 5367 - RNA, 20 nt, synthetic construct
  source 1..20: mol_type = other RNA
cagtatgcacatctgcatgc

SEQ ID NO: 5368 - RNA, 20 nt, synthetic construct
  source 1..20: mol_type = other RNA
catctgcatgcaggtgcctg

SEQ ID NO: 5369 - RNA, 20 nt, synthetic construct
  source 1..20: mol_type = other RNA
caggtgcctgtggaagcctg

SEQ ID NO: 5370 - RNA, 20 nt, synthetic construct
  source 1..20: mol_type = other RNA
atgtctccacaggcttccac

SEQ ID NO: 5371 - RNA, 20 nt, synthetic construct
  source 1..20: mol_type = other RNA
aggtgatctgatgtctccac

SEQ ID NO: 5372 - RNA, 20 nt, synthetic construct
  source 1..20: mol_type = other RNA
gacatcagatcacctgaagc

SEQ ID NO: 5373 - RNA, 20 nt, synthetic construct
  source 1..20: mol_type = other RNA
tcacctgaagctggagtttc

SEQ ID NO: 5374 - RNA, 20 nt, synthetic construct
  source 1..20: mol_type = other RNA
ctgcctgaaactccagcttc

SEQ ID NO: 5375 - RNA, 20 nt, synthetic construct
  source 1..20: mol_type = other RNA
agttttatgccaccagacac

SEQ ID NO: 5376 - RNA, 20 nt, synthetic construct
  source 1..20: mol_type = other RNA
ttctcagcaccagtgtctgg

SEQ ID NO: 5377 - RNA, 20 nt, synthetic construct
  source 1..20: mol_type = other RNA
ctattctcagcaccagtgtc

SEQ ID NO: 5378 - RNA, 20 nt, synthetic construct
  source 1..20: mol_type = other RNA
ataaaatatactgcttttgc

SEQ ID NO: 5379 - RNA, 20 nt, synthetic construct
  source 1..20: mol_type = other RNA
gttgcttttggctggagaga

SEQ ID NO: 5380 - RNA, 20 nt, synthetic construct
  source 1..20: mol_type = other RNA
ttttaaaggttgcttttggc

SEQ ID NO: 5381 - RNA, 20 nt, synthetic construct
  source 1..20: mol_type = other RNA
cagcttttaaaggttgcttt

SEQ ID NO: 5382 - RNA, 20 nt, synthetic construct
  source 1..20: mol_type = other RNA
aaagcaacctttaaaagctg

SEQ ID NO: 5383 - RNA, 20 nt, synthetic construct
  source 1..20: mol_type = other RNA
acataaaccacagcttttaa

SEQ ID NO: 5384 - RNA, 20 nt, synthetic construct
  source 1..20: mol_type = other RNA
ctctaagtggatgaattaaa

SEQ ID NO: 5385 - RNA, 20 nt, synthetic construct
  source 1..20: mol_type = other RNA
catttaattcatccacttag

SEQ ID NO: 5386 - RNA, 20 nt, synthetic construct
  source 1..20: mol_type = other RNA
atttaattcatccacttaga

SEQ ID NO: 5387 - RNA, 20 nt, synthetic construct
  source 1..20: mol_type = other RNA
attgaagtgtaccctctaag

SEQ ID NO: 5388 - RNA, 20 nt, synthetic construct
  source 1..20: mol_type = other RNA
aaaatatgcttacagatctg

SEQ ID NO: 5389 - RNA, 20 nt, synthetic construct
  source 1..20: mol_type = other RNA
aaatatgcttacagatctgt

SEQ ID NO: 5390 - RNA, 20 nt, synthetic construct
  source 1..20: mol_type = other RNA
tgctaaaagggttctaaaat

SEQ ID NO: 5391 - RNA, 20 nt, synthetic construct
  source 1..20: mol_type = other RNA
taatatctgtagtgctaaaa

SEQ ID NO: 5392 - RNA, 20 nt, synthetic construct
  source 1..20: mol_type = other RNA
ttaatatctgtagtgctaaa

SEQ ID NO: 5393 - RNA, 20 nt, synthetic construct
  source 1..20: mol_type = other RNA
gctgggggctggggagaata

SEQ ID NO: 5394 - RNA, 20 nt, synthetic construct
  source 1..20: mol_type = other RNA
agctgggggctggggagaat

SEQ ID NO: 5395 - RNA, 20 nt, synthetic construct
  source 1..20: mol_type = other RNA
gggactggagctgggggctg

SEQ ID NO: 5396 - RNA, 20 nt, synthetic construct
  source 1..20: mol_type = other RNA
agggactggagctgggggct

SEQ ID NO: 5397 - RNA, 20 nt, synthetic construct
  source 1..20: mol_type = other RNA
cagggactggagctgggggc

SEQ ID NO: 5398 - RNA, 20 nt, synthetic construct
  source 1..20: mol_type = other RNA
cagcccccagctccagtccc

SEQ ID NO: 5399 - RNA, 20 nt, synthetic construct
  source 1..20: mol_type = other RNA
atgccagggactggagctgg

SEQ ID NO: 5400 - RNA, 20 nt, synthetic construct
  source 1..20: mol_type = other RNA
gatgccagggactggagctg

SEQ ID NO: 5401 - RNA, 20 nt, synthetic construct
  source 1..20: mol_type = other RNA
ggatgccagggactggagct

SEQ ID NO: 5402 - RNA, 20 nt, synthetic construct
  source 1..20: mol_type = other RNA
tggatgccagggactggagc

SEQ ID NO: 5403 - RNA, 20 nt, synthetic construct
  source 1..20: mol_type = other RNA
gatttgtggatgccagggac

SEQ ID NO: 5404 - RNA, 20 nt, synthetic construct
  source 1..20: mol_type = other RNA
aaggggatttgtggatgcca

SEQ ID NO: 5405 - RNA, 20 nt, synthetic construct
  source 1..20: mol_type = other RNA
gaaggggatttgtggatgcc

SEQ ID NO: 5406 - RNA, 20 nt, synthetic construct
  source 1..20: mol_type = other RNA
gatggcaggaaggggatttg

SEQ ID NO: 5407 - RNA, 20 nt, synthetic construct
  source 1..20: mol_type = other RNA
aatctatagatggcaggaag

SEQ ID NO: 5408 - RNA, 20 nt, synthetic construct
  source 1..20: mol_type = other RNA
gaatctatagatggcaggaa

SEQ ID NO: 5409 - RNA, 20 nt, synthetic construct
  source 1..20: mol_type = other RNA
tgaatctatagatggcagga

SEQ ID NO: 5410 - RNA, 20 nt, synthetic construct
  source 1..20: mol_type = other RNA
gaggtgaatctatagatggc

SEQ ID NO: 5411 - RNA, 20 nt, synthetic construct
  source 1..20: mol_type = other RNA
agaagaggtgaatctataga

SEQ ID NO: 5412 - RNA, 20 nt, synthetic construct
  source 1..20: mol_type = other RNA
ttcagtgtaaagtctagaag

SEQ ID NO: 5413 - RNA, 20 nt, synthetic construct
  source 1..20: mol_type = other RNA
ttctagactttacactgaaa

SEQ ID NO: 5414 - RNA, 20 nt, synthetic construct
  source 1..20: mol_type = other RNA
aaatggtattacacaacatg

SEQ ID NO: 5415 - RNA, 20 nt, synthetic construct
  source 1..20: mol_type = other RNA
ttgcttgccgtgtgtctgtg

SEQ ID NO: 5416 - RNA, 20 nt, synthetic construct
  source 1..20: mol_type = other RNA
agatgaacctcacagacaca

SEQ ID NO: 5417 - RNA, 20 nt, synthetic construct
  source 1..20: mol_type = other RNA
tcatctgtgttgagcatgaa

SEQ ID NO: 5418 - RNA, 20 nt, synthetic construct
  source 1..20: mol_type = other RNA
taggcgacaggcatattcat

SEQ ID NO: 5419 - RNA, 20 nt, synthetic construct
  source 1..20: mol_type = other RNA
ttaggcgacaggcatattca

SEQ ID NO: 5420 - RNA, 20 nt, synthetic construct
  source 1..20: mol_type = other RNA
gtgttgctattttaggcgac

SEQ ID NO: 5421 - RNA, 20 nt, synthetic construct
  source 1..20: mol_type = other RNA
tgtgaaagtgttgctatttt

SEQ ID NO: 5422 - RNA, 20 nt, synthetic construct
  source 1..20: mol_type = other RNA
ccttctttcttcttcccaag

SEQ ID NO: 5423 - RNA, 20 nt, synthetic construct
  source 1..20: mol_type = other RNA
cctcttgggaagaagaaaga

SEQ ID NO: 5424 - RNA, 20 nt, synthetic construct
  source 1..20: mol_type = other RNA
cttctttcttcttcccaaga

SEQ ID NO: 5425 - RNA, 20 nt, synthetic construct
  source 1..20: mol_type = other RNA
gctgcaataatgtccctctt

SEQ ID NO: 5426 - RNA, 20 nt, synthetic construct
  source 1..20: mol_type = other RNA
ggctgcaataatgtccctct

SEQ ID NO: 5427 - RNA, 20 nt, synthetic construct
  source 1..20: mol_type = other RNA
agacacaggagaaaactagc

SEQ ID NO: 5428 - RNA, 20 nt, synthetic construct
  source 1..20: mol_type = other RNA
agaaacacgaaaaaagacac

SEQ ID NO: 5429 - RNA, 20 nt, synthetic construct
  source 1..20: mol_type = other RNA
cgtgtttctcaagtagatga

SEQ ID NO: 5430 - RNA, 20 nt, synthetic construct
  source 1..20: mol_type = other RNA
gtgtttctcaagtagatgaa

SEQ ID NO: 5431 - RNA, 20 nt, synthetic construct
  source 1..20: mol_type = other RNA
tctcaagtagatgaagggac

SEQ ID NO: 5432 - RNA, 20 nt, synthetic construct
  source 1..20: mol_type = other RNA
ttaggaaactgacaaagcag

SEQ ID NO: 5433 - RNA, 20 nt, synthetic construct
  source 1..20: mol_type = other RNA
tttaggaaactgacaaagca

SEQ ID NO: 5434 - RNA, 20 nt, synthetic construct
  source 1..20: mol_type = other RNA
atttaggaaactgacaaagc

SEQ ID NO: 5435 - RNA, 20 nt, synthetic construct
  source 1..20: mol_type = other RNA
aatacagtattcactcattt

SEQ ID NO: 5436 - RNA, 20 nt, synthetic construct
  source 1..20: mol_type = other RNA
aaatgagtgaatactgtatt

SEQ ID NO: 5437 - RNA, 20 nt, synthetic construct
  source 1..20: mol_type = other RNA
tattttggtctttctgattg

SEQ ID NO: 5438 - RNA, 20 nt, synthetic construct
  source 1..20: mol_type = other RNA
ttattttggtctttctgatt

SEQ ID NO: 5439 - RNA, 20 nt, synthetic construct
  source 1..20: mol_type = other RNA
attattttggtctttctgat

SEQ ID NO: 5440 - RNA, 20 nt, synthetic construct
  source 1..20: mol_type = other RNA
gagattattttaaattattt

SEQ ID NO: 5441 - RNA, 20 nt, synthetic construct
  source 1..20: mol_type = other RNA
atctcgtctctatatcacta

SEQ ID NO: 5442 - RNA, 20 nt, synthetic construct
  source 1..20: mol_type = other RNA
ctaaggtatccttttccact

SEQ ID NO: 5443 - RNA, 20 nt, synthetic construct
  source 1..20: mol_type = other RNA
taaggtatccttttccactt

SEQ ID NO: 5444 - RNA, 20 nt, synthetic construct
  source 1..20: mol_type = other RNA
ctgcatggcccaagtggaaa

SEQ ID NO: 5445 - RNA, 20 nt, synthetic construct
  source 1..20: mol_type = other RNA
atttctctgcatggcccaag

SEQ ID NO: 5446 - RNA, 20 nt, synthetic construct
  source 1..20: mol_type = other RNA
ggcatgcttatttctctgca

SEQ ID NO: 5447 - RNA, 20 nt, synthetic construct
  source 1..20: mol_type = other RNA
gggtggggtggggtcaatca

SEQ ID NO: 5448 - RNA, 20 nt, synthetic construct
  source 1..20: mol_type = other RNA
ctgggggttggggtggggtg

SEQ ID NO: 5449 - RNA, 20 nt, synthetic construct
  source 1..20: mol_type = other RNA
actgggggttggggtggggt

SEQ ID NO: 5450 - RNA, 20 nt, synthetic construct
  source 1..20: mol_type = other RNA
cactgggggttggggtgggg

SEQ ID NO: 5451 - RNA, 20 nt, synthetic construct
  source 1..20: mol_type = other RNA
caccccaccccaacccccag

SEQ ID NO: 5452 - RNA, 20 nt, synthetic construct
  source 1..20: mol_type = other RNA
caccactgggggttggggtg

SEQ ID NO: 5453 - RNA, 20 nt, synthetic construct
  source 1..20: mol_type = other RNA
tcaccactgggggttggggt

SEQ ID NO: 5454 - RNA, 20 nt, synthetic construct
  source 1..20: mol_type = other RNA
gtcaccactgggggttgggg

SEQ ID NO: 5455 - RNA, 20 nt, synthetic construct
  source 1..20: mol_type = other RNA
cttgtcaccactgggggttg

SEQ ID NO: 5456 - RNA, 20 nt, synthetic construct
  source 1..20: mol_type = other RNA
cccaacccccagtggtgaca

SEQ ID NO: 5457 - RNA, 20 nt, synthetic construct
  source 1..20: mol_type = other RNA
ccttgtcaccactgggggtt

SEQ ID NO: 5458 - RNA, 20 nt, synthetic construct
  source 1..20: mol_type = other RNA
tccttgtcaccactgggggt

SEQ ID NO: 5459 - RNA, 20 nt, synthetic construct
  source 1..20: mol_type = other RNA
gaggtccttgtcaccactgg

SEQ ID NO: 5460 - RNA, 20 nt, synthetic construct
  source 1..20: mol_type = other RNA
ggaggtccttgtcaccactg

SEQ ID NO: 5461 - RNA, 20 nt, synthetic construct
  source 1..20: mol_type = other RNA
gggaggtccttgtcaccact

SEQ ID NO: 5462 - RNA, 20 nt, synthetic construct
  source 1..20: mol_type = other RNA
ggggaggtccttgtcaccac

SEQ ID NO: 5463 - RNA, 20 nt, synthetic construct
  source 1..20: mol_type = other RNA
ggtgacaaggacctccccag

SEQ ID NO: 5464 - RNA, 20 nt, synthetic construct
  source 1..20: mol_type = other RNA
aaatggttgagccgctgggg

SEQ ID NO: 5465 - RNA, 20 nt, synthetic construct
  source 1..20: mol_type = other RNA
ttcaaatggttgagccgctg

SEQ ID NO: 5466 - RNA, 20 nt, synthetic construct
  source 1..20: mol_type = other RNA
attcaaatggttgagccgct

SEQ ID NO: 5467 - RNA, 20 nt, synthetic construct
  source 1..20: mol_type = other RNA
tattcaaatggttgagccgc

SEQ ID NO: 5468 - RNA, 20 nt, synthetic construct
  source 1..20: mol_type = other RNA
gctcaaccatttgaataaaa

SEQ ID NO: 5469 - RNA, 20 nt, synthetic construct
  source 1..20: mol_type = other RNA
aagtgtcctttttattcaaa

SEQ ID NO: 5470 - RNA, 20 nt, synthetic construct
  source 1..20: mol_type = other RNA
atcttagatttgtgcaaaat

SEQ ID NO: 5471 - RNA, 20 nt, synthetic construct
  source 1..20: mol_type = other RNA
catcttagatttgtgcaaaa

SEQ ID NO: 5472 - RNA, 20 nt, synthetic construct
  source 1..20: mol_type = other RNA
acaaatctaagatgagcaag

SEQ ID NO: 5473 - RNA, 20 nt, synthetic construct
  source 1..20: mol_type = other RNA
gtcacctgtaaacatgtgcc

SEQ ID NO: 5474 - RNA, 20 nt, synthetic construct
  source 1..20: mol_type = other RNA
tgctccaggcacatgtttac

SEQ ID NO: 5475 - RNA, 20 nt, synthetic construct
  source 1..20: mol_type = other RNA
gtaaacatgtgcctggagca

SEQ ID NO: 5476 - RNA, 20 nt, synthetic construct
  source 1..20: mol_type = other RNA
ctcaggtcgttccgtgctcc

SEQ ID NO: 5477 - RNA, 20 nt, synthetic construct
  source 1..20: mol_type = other RNA
gagcacggaacgacctgagt

SEQ ID NO: 5478 - RNA, 20 nt, synthetic construct
  source 1..20: mol_type = other RNA
cgacctgagtaggcagaaaa

SEQ ID NO: 5479 - RNA, 20 nt, synthetic construct
  source 1..20: mol_type = other RNA
cctgagtaggcagaaaaagg

SEQ ID NO: 5480 - RNA, 20 nt, synthetic construct
  source 1..20: mol_type = other RNA
ccacctttttctgcctactc

SEQ ID NO: 5481 - RNA, 20 nt, synthetic construct
  source 1..20: mol_type = other RNA
atttatgatttttcttttaa

SEQ ID NO: 5482 - RNA, 20 nt, synthetic construct
  source 1..20: mol_type = other RNA
agtgagaaaggtgggggaaa

SEQ ID NO: 5483 - RNA, 20 nt, synthetic construct
  source 1..20: mol_type = other RNA
ttggaaagtgagaaaggtgg

SEQ ID NO: 5484 - RNA, 20 nt, synthetic construct
  source 1..20: mol_type = other RNA
gttggaaagtgagaaaggtg

SEQ ID NO: 5485 - RNA, 20 nt, synthetic construct
  source 1..20: mol_type = other RNA
tgttggaaagtgagaaaggt

SEQ ID NO: 5486 - RNA, 20 nt, synthetic construct
  source 1..20: mol_type = other RNA
ttgttggaaagtgagaaagg

SEQ ID NO: 5487 - RNA, 20 nt, synthetic construct
  source 1..20: mol_type = other RNA
atattgttggaaagtgagaa

SEQ ID NO: 5488 - RNA, 20 nt, synthetic construct
  source 1..20: mol_type = other RNA
tttccaacaatattatattc

SEQ ID NO: 5489 - RNA, 20 nt, synthetic construct
  source 1..20: mol_type = other RNA
acaccagaatataatattgt

SEQ ID NO: 5490 - RNA, 20 nt, synthetic construct
  source 1..20: mol_type = other RNA
cttttattccccagttgttt

SEQ ID NO: 5491 - RNA, 20 nt, synthetic construct
  source 1..20: mol_type = other RNA
tttaatcaccaaaacaactg

SEQ ID NO: 5492 - RNA, 20 nt, synthetic construct
  source 1..20: mol_type = other RNA
atttaatcaccaaaacaact

SEQ ID NO: 5493 - RNA, 20 nt, synthetic construct
  source 1..20: mol_type = other RNA
gatttaatcaccaaaacaac

SEQ ID NO: 5494 - RNA, 20 nt, synthetic construct
  source 1..20: mol_type = other RNA
ttttggtgattaaatcattt

SEQ ID NO: 5495 - RNA, 20 nt, synthetic construct
  source 1..20: mol_type = other RNA
tttggtgattaaatcatttt

SEQ ID NO: 5496 - RNA, 20 nt, synthetic construct
  source 1..20: mol_type = other RNA
ttggtgattaaatcattttg

SEQ ID NO: 5497 - RNA, 20 nt, synthetic construct
  source 1..20: mol_type = other RNA
tggtgattaaatcattttgg

SEQ ID NO: 5498 - RNA, 20 nt, synthetic construct
  source 1..20: mol_type = other RNA
actctcattcactgctccct

SEQ ID NO: 5499 - RNA, 20 nt, synthetic construct
  source 1..20: mol_type = other RNA
aaaaaaaacactgtcaccaa

SEQ ID NO: 5500 - RNA, 20 nt, synthetic construct
  source 1..20: mol_type = other RNA
gaaaaaaaacactgtcacca

SEQ ID NO: 5501 - RNA, 20 nt, synthetic construct
  source 1..20: mol_type = other RNA
gcagagacagagggaacagc

SEQ ID NO: 5502 - RNA, 20 nt, synthetic construct
  source 1..20: mol_type = other RNA
tgaaaatgagcagagacaga

SEQ ID NO: 5503 - RNA, 20 nt, synthetic construct
  source 1..20: mol_type = other RNA
atgaaaatgagcagagacag

SEQ ID NO: 5504 - RNA, 20 nt, synthetic construct
  source 1..20: mol_type = other RNA
ctgtctctgctcattttcat

SEQ ID NO: 5505 - RNA, 20 nt, synthetic construct
  source 1..20: mol_type = other RNA
tgctcattttcataggaatc

SEQ ID NO: 5506 - RNA, 20 nt, synthetic construct
  source 1..20: mol_type = other RNA
atctggcaccttagaatccc

SEQ ID NO: 5507 - RNA, 20 nt, synthetic construct
  source 1..20: mol_type = other RNA
gcaggcagcctgggattcta

SEQ ID NO: 5508 - RNA, 20 nt, synthetic construct
  source 1..20: mol_type = other RNA
catttgactgcaggcagcct

SEQ ID NO: 5509 - RNA, 20 nt, synthetic construct
  source 1..20: mol_type = other RNA
gcatttgactgcaggcagcc

SEQ ID NO: 5510 - RNA, 20 nt, synthetic construct
  source 1..20: mol_type = other RNA
cctgcagtcaaatgcttgct

SEQ ID NO: 5511 - RNA, 20 nt, synthetic construct
  source 1..20: mol_type = other RNA
cctagcaagcatttgactgc

SEQ ID NO: 5512 - RNA, 20 nt, synthetic construct
  source 1..20: mol_type = other RNA
ctgcagtcaaatgcttgcta

SEQ ID NO: 5513 - RNA, 20 nt, synthetic construct
  source 1..20: mol_type = other RNA
cagtcaaatgcttgctaggg

SEQ ID NO: 5514 - RNA, 20 nt, synthetic construct
  source 1..20: mol_type = other RNA
agtcaaatgcttgctaggga

SEQ ID NO: 5515 - RNA, 20 nt, synthetic construct
  source 1..20: mol_type = other RNA
gtcaaatgcttgctagggag

SEQ ID NO: 5516 - RNA, 20 nt, synthetic construct
  source 1..20: mol_type = other RNA
ttgctagggaggggagccag

SEQ ID NO: 5517 - RNA, 20 nt, synthetic construct
  source 1..20: mol_type = other RNA
tgctagggaggggagccagt

SEQ ID NO: 5518 - RNA, 20 nt, synthetic construct
  source 1..20: mol_type = other RNA
tagggaggggagccagtggg

SEQ ID NO: 5519 - RNA, 20 nt, synthetic construct
  source 1..20: mol_type = other RNA
agggaggggagccagtgggt

SEQ ID NO: 5520 - RNA, 20 nt, synthetic construct
  source 1..20: mol_type = other RNA
gggaggggagccagtgggtg

SEQ ID NO: 5521 - RNA, 20 nt, synthetic construct
  source 1..20: mol_type = other RNA
ggaggggagccagtgggtgg

SEQ ID NO: 5522 - RNA, 20 nt, synthetic construct
  source 1..20: mol_type = other RNA
ttgcaggttcccccacccac

SEQ ID NO: 5523 - RNA, 20 nt, synthetic construct
  source 1..20: mol_type = other RNA
atttggagttgatttcttgc

SEQ ID NO: 5524 - RNA, 20 nt, synthetic construct
  source 1..20: mol_type = other RNA
aaatcaactccaaatttaat

SEQ ID NO: 5525 - RNA, 20 nt, synthetic construct
  source 1..20: mol_type = other RNA
gagcttagtcctattaaatt

SEQ ID NO: 5526 - RNA, 20 nt, synthetic construct
  source 1..20: mol_type = other RNA
ctgctaatcaggcatggtgt

SEQ ID NO: 5527 - RNA, 20 nt, synthetic construct
  source 1..20: mol_type = other RNA
accatgcctgattagcagct

SEQ ID NO: 5528 - RNA, 20 nt, synthetic construct
  source 1..20: mol_type = other RNA
acctagctgctaatcaggca

SEQ ID NO: 5529 - RNA, 20 nt, synthetic construct
  source 1..20: mol_type = other RNA
atgagacctagctgctaatc

SEQ ID NO: 5530 - RNA, 20 nt, synthetic construct
  source 1..20: mol_type = other RNA
ggtctcatccttacccctcc

SEQ ID NO: 5531 - RNA, 20 nt, synthetic construct
  source 1..20: mol_type = other RNA
tccttacccctccaggaata

SEQ ID NO: 5532 - RNA, 20 nt, synthetic construct
  source 1..20: mol_type = other RNA
tccttattcctggaggggta

SEQ ID NO: 5533 - RNA, 20 nt, synthetic construct
  source 1..20: mol_type = other RNA
tacccctccaggaataagga

SEQ ID NO: 5534 - RNA, 20 nt, synthetic construct
  source 1..20: mol_type = other RNA
aaccttccttattcctggag

SEQ ID NO: 5535 - RNA, 20 nt, synthetic construct
  source 1..20: mol_type = other RNA
caaccttccttattcctgga

SEQ ID NO: 5536 - RNA, 20 nt, synthetic construct
  source 1..20: mol_type = other RNA
gcaaccttccttattcctgg

SEQ ID NO: 5537 - RNA, 20 nt, synthetic construct
  source 1..20: mol_type = other RNA
tctgcaaccttccttattcc

SEQ ID NO: 5538 - RNA, 20 nt, synthetic construct
  source 1..20: mol_type = other RNA
aggttgcagaagtccctgaa

SEQ ID NO: 5539 - RNA, 20 nt, synthetic construct
  source 1..20: mol_type = other RNA
ggctcagcaaatacctttca

SEQ ID NO: 5540 - RNA, 20 nt, synthetic construct
  source 1..20: mol_type = other RNA
aggctcagcaaatacctttc

SEQ ID NO: 5541 - RNA, 20 nt, synthetic construct
  source 1..20: mol_type = other RNA
gctgagcctcttgtgaaccg

SEQ ID NO: 5542 - RNA, 20 nt, synthetic construct
  source 1..20: mol_type = other RNA
ctgagcctcttgtgaaccgt

SEQ ID NO: 5543 - RNA, 20 nt, synthetic construct
  source 1..20: mol_type = other RNA
gcctcttgtgaaccgtgggt

SEQ ID NO: 5544 - RNA, 20 nt, synthetic construct
  source 1..20: mol_type = other RNA
gccaacccacggttcacaag

SEQ ID NO: 5545 - RNA, 20 nt, synthetic construct
  source 1..20: mol_type = other RNA
agttcaggtgagccaaccca

SEQ ID NO: 5546 - RNA, 20 nt, synthetic construct
  source 1..20: mol_type = other RNA
aagaatatctactaaagttc

SEQ ID NO: 5547 - RNA, 20 nt, synthetic construct
  source 1..20: mol_type = other RNA
atattctttagcgacatatt

SEQ ID NO: 5548 - RNA, 20 nt, synthetic construct
  source 1..20: mol_type = other RNA
tattctttagcgacatattt

SEQ ID NO: 5549 - RNA, 20 nt, synthetic construct
  source 1..20: mol_type = other RNA
ttagcgacatatttgggctt

SEQ ID NO: 5550 - RNA, 20 nt, synthetic construct
  source 1..20: mol_type = other RNA
tgtggagagataaaagagag

SEQ ID NO: 5551 - RNA, 20 nt, synthetic construct
  source 1..20: mol_type = other RNA
ttatctctccacaaaagtct

SEQ ID NO: 5552 - RNA, 20 nt, synthetic construct
  source 1..20: mol_type = other RNA
tcagtttgccaagacttttg

SEQ ID NO: 5553 - RNA, 20 nt, synthetic construct
  source 1..20: mol_type = other RNA
tgatgtttatgcaaccagta

SEQ ID NO: 5554 - RNA, 20 nt, synthetic construct
  source 1..20: mol_type = other RNA
tatgcaaccagtaaggcctc

SEQ ID NO: 5555 - RNA, 20 nt, synthetic construct
  source 1..20: mol_type = other RNA
atgcaaccagtaaggcctct

SEQ ID NO: 5556 - RNA, 20 nt, synthetic construct
  source 1..20: mol_type = other RNA
tgcaaccagtaaggcctctg

SEQ ID NO: 5557 - RNA, 20 nt, synthetic construct
  source 1..20: mol_type = other RNA
ctcagccccagaggccttac

SEQ ID NO: 5558 - RNA, 20 nt, synthetic construct
  source 1..20: mol_type = other RNA
cagtaaggcctctggggctg

SEQ ID NO: 5559 - RNA, 20 nt, synthetic construct
  source 1..20: mol_type = other RNA
agtaaggcctctggggctga

SEQ ID NO: 5560 - RNA, 20 nt, synthetic construct
  source 1..20: mol_type = other RNA
gtaaggcctctggggctgag

SEQ ID NO: 5561 - RNA, 20 nt, synthetic construct
  source 1..20: mol_type = other RNA
taaggcctctggggctgagg

SEQ ID NO: 5562 - RNA, 20 nt, synthetic construct
  source 1..20: mol_type = other RNA
ggcctctggggctgaggggg

SEQ ID NO: 5563 - RNA, 20 nt, synthetic construct
  source 1..20: mol_type = other RNA
gcctctggggctgagggggt

SEQ ID NO: 5564 - RNA, 20 nt, synthetic construct
  source 1..20: mol_type = other RNA
tcccaccccctcagccccag

SEQ ID NO: 5565 - RNA, 20 nt, synthetic construct
  source 1..20: mol_type = other RNA
ctgagggggtgggaagccag

SEQ ID NO: 5566 - RNA, 20 nt, synthetic construct
  source 1..20: mol_type = other RNA
tgagggggtgggaagccagt

SEQ ID NO: 5567 - RNA, 20 nt, synthetic construct
  source 1..20: mol_type = other RNA
gggggtgggaagccagtggg

SEQ ID NO: 5568 - RNA, 20 nt, synthetic construct
  source 1..20: mol_type = other RNA
ggtgggaagccagtgggtgg

SEQ ID NO: 5569 - RNA, 20 nt, synthetic construct
  source 1..20: mol_type = other RNA
ttgcaggttccgccacccac

SEQ ID NO: 5570 - RNA, 20 nt, synthetic construct
  source 1..20: mol_type = other RNA
atttggggcggatttcttgc

SEQ ID NO: 5571 - RNA, 20 nt, synthetic construct
  source 1..20: mol_type = other RNA
agaaatccgccccaaattta

SEQ ID NO: 5572 - RNA, 20 nt, synthetic construct
  source 1..20: mol_type = other RNA
atgcttccttaaatttgggg

SEQ ID NO: 5573 - RNA, 20 nt, synthetic construct
  source 1..20: mol_type = other RNA
ccccaaatttaaggaagcat

SEQ ID NO: 5574 - RNA, 20 nt, synthetic construct
  source 1..20: mol_type = other RNA
cctatgcttccttaaatttg

SEQ ID NO: 5575 - RNA, 20 nt, synthetic construct
  source 1..20: mol_type = other RNA
tcctatgcttccttaaattt

SEQ ID NO: 5576 - RNA, 20 nt, synthetic construct
  source 1..20: mol_type = other RNA
ttcctatgcttccttaaatt

SEQ ID NO: 5577 - RNA, 20 nt, synthetic construct
  source 1..20: mol_type = other RNA
cctaccctatgtctgccttg

SEQ ID NO: 5578 - RNA, 20 nt, synthetic construct
  source 1..20: mol_type = other RNA
ccacaaggcagacatagggt

SEQ ID NO: 5579 - RNA, 20 nt, synthetic construct
  source 1..20: mol_type = other RNA
ctagccacaaggcagacata

SEQ ID NO: 5580 - RNA, 20 nt, synthetic construct
  source 1..20: mol_type = other RNA
cctatgtctgccttgtggct

SEQ ID NO: 5581 - RNA, 20 nt, synthetic construct
  source 1..20: mol_type = other RNA
cctagccacaaggcagacat

SEQ ID NO: 5582 - RNA, 20 nt, synthetic construct
  source 1..20: mol_type = other RNA
gaactaaggacctagccaca

SEQ ID NO: 5583 - RNA, 20 nt, synthetic construct
  source 1..20: mol_type = other RNA
tccttagttcattgtctctt

SEQ ID NO: 5584 - RNA, 20 nt, synthetic construct
  source 1..20: mol_type = other RNA
acctaagagacaatgaacta

SEQ ID NO: 5585 - RNA, 20 nt, synthetic construct
  source 1..20: mol_type = other RNA
ttctactctcaagagaatct

SEQ ID NO: 5586 - RNA, 20 nt, synthetic construct
  source 1..20: mol_type = other RNA
cttctactctcaagagaatc

SEQ ID NO: 5587 - RNA, 20 nt, synthetic construct
  source 1..20: mol_type = other RNA
cagattctcttgagagtaga

SEQ ID NO: 5588 - RNA, 20 nt, synthetic construct
  source 1..20: mol_type = other RNA
attctcttgagagtagaagg

SEQ ID NO: 5589 - RNA, 20 nt, synthetic construct
  source 1..20: mol_type = other RNA
tctcggatttgttaatcagg

SEQ ID NO: 5590 - RNA, 20 nt, synthetic construct
  source 1..20: mol_type = other RNA
tcctgattaacaaatccgag

SEQ ID NO: 5591 - RNA, 20 nt, synthetic construct
  source 1..20: mol_type = other RNA
acctctcggatttgttaatc

SEQ ID NO: 5592 - RNA, 20 nt, synthetic construct
  source 1..20: mol_type = other RNA
ttcatgagattagcacctct

SEQ ID NO: 5593 - RNA, 20 nt, synthetic construct
  source 1..20: mol_type = other RNA
gctaatctcatgaattctcc

SEQ ID NO: 5594 - RNA, 20 nt, synthetic construct
  source 1..20: mol_type = other RNA
tcatgaattctcccggacta

SEQ ID NO: 5595 - RNA, 20 nt, synthetic construct
  source 1..20: mol_type = other RNA
gctatatataaccatagtcc

SEQ ID NO: 5596 - RNA, 20 nt, synthetic construct
  source 1..20: mol_type = other RNA
agctatatataaccatagtc

SEQ ID NO: 5597 - RNA, 20 nt, synthetic construct
  source 1..20: mol_type = other RNA
tcagtgatctcatgtagctt

SEQ ID NO: 5598 - RNA, 20 nt, synthetic construct
  source 1..20: mol_type = other RNA
tgatctcatgtagcttaggc

SEQ ID NO: 5599 - RNA, 20 nt, synthetic construct
  source 1..20: mol_type = other RNA
ctcatgtagcttaggctggc

SEQ ID NO: 5600 - RNA, 20 nt, synthetic construct
  source 1..20: mol_type = other RNA
ttgagctcactatgaagcaa

SEQ ID NO: 5601 - RNA, 20 nt, synthetic construct
  source 1..20: mol_type = other RNA
aaggatgaccctgaacttct

SEQ ID NO: 5602 - RNA, 20 nt, synthetic construct
  source 1..20: mol_type = other RNA
caggaaaaccaagaagttca

SEQ ID NO: 5603 - RNA, 20 nt, synthetic construct
  source 1..20: mol_type = other RNA
gcaggaaaaccaagaagttc

SEQ ID NO: 5604 - RNA, 20 nt, synthetic construct
  source 1..20: mol_type = other RNA
agcacttggaagatgaaagc

SEQ ID NO: 5605 - RNA, 20 nt, synthetic construct
  source 1..20: mol_type = other RNA
attcttgtaatcgcagcact

SEQ ID NO: 5606 - RNA, 20 nt, synthetic construct
  source 1..20: mol_type = other RNA
gctgccatgtctagttcatg

SEQ ID NO: 5607 - RNA, 20 nt, synthetic construct
  source 1..20: mol_type = other RNA
agcaccacatgaactagaca

SEQ ID NO: 5608 - RNA, 20 nt, synthetic construct
  source 1..20: mol_type = other RNA
tgtctagttcatgtggtgct

SEQ ID NO: 5609 - RNA, 20 nt, synthetic construct
  source 1..20: mol_type = other RNA
gtctagttcatgtggtgcta

SEQ ID NO: 5610 - RNA, 20 nt, synthetic construct
  source 1..20: mol_type = other RNA
ggtgctagggatcaaccctg

SEQ ID NO: 5611 - RNA, 20 nt, synthetic construct
  source 1..20: mol_type = other RNA
ttaacatgcacaaagcctca

SEQ ID NO: 5612 - RNA, 20 nt, synthetic construct
  source 1..20: mol_type = other RNA
cttaacatgcacaaagcctc

SEQ ID NO: 5613 - RNA, 20 nt, synthetic construct
  source 1..20: mol_type = other RNA
attcttttgagtcagggtca

SEQ ID NO: 5614 - RNA, 20 nt, synthetic construct
  source 1..20: mol_type = other RNA
tattcttttgagtcagggtc

SEQ ID NO: 5615 - RNA, 20 nt, synthetic construct
  source 1..20: mol_type = other RNA
tgaccctgactcaaaagaat

SEQ ID NO: 5616 - RNA, 20 nt, synthetic construct
  source 1..20: mol_type = other RNA
gaccctgactcaaaagaata

SEQ ID NO: 5617 - RNA, 20 nt, synthetic construct
  source 1..20: mol_type = other RNA
accctgactcaaaagaatag

SEQ ID NO: 5618 - RNA, 20 nt, synthetic construct
  source 1..20: mol_type = other RNA
ccctgactcaaaagaatagg

SEQ ID NO: 5619 - RNA, 20 nt, synthetic construct
  source 1..20: mol_type = other RNA
ccccctattcttttgagtca

SEQ ID NO: 5620 - RNA, 20 nt, synthetic construct
  source 1..20: mol_type = other RNA
cctgactcaaaagaataggg

SEQ ID NO: 5621 - RNA, 20 nt, synthetic construct
  source 1..20: mol_type = other RNA
cccccctattcttttgagtc

SEQ ID NO: 5622 - RNA, 20 nt, synthetic construct
  source 1..20: mol_type = other RNA
ctgactcaaaagaatagggg

SEQ ID NO: 5623 - RNA, 20 nt, synthetic construct
  source 1..20: mol_type = other RNA
actcaaaagaataggggggg

SEQ ID NO: 5624 - RNA, 20 nt, synthetic construct
  source 1..20: mol_type = other RNA
aaaagaatagggggggagga

SEQ ID NO: 5625 - RNA, 20 nt, synthetic construct
  source 1..20: mol_type = other RNA
gaatagggggggaggaagga

SEQ ID NO: 5626 - RNA, 20 nt, synthetic construct
  source 1..20: mol_type = other RNA
agggggggaggaaggaagga

SEQ ID NO: 5627 - RNA, 20 nt, synthetic construct
  source 1..20: mol_type = other RNA
ggggaggaaggaaggaagga

SEQ ID NO: 5628 - RNA, 20 nt, synthetic construct
  source 1..20: mol_type = other RNA
aggaaggaaggaaggaagga

SEQ ID NO: 5629 - RNA, 20 nt, synthetic construct
  source 1..20: mol_type = other RNA
aggaaggaaggaaggaagga

SEQ ID NO: 5630 - RNA, 20 nt, synthetic construct
  source 1..20: mol_type = other RNA
ggaaggaaggaaggaaggaa

SEQ ID NO: 5631 - RNA, 20 nt, synthetic construct
  source 1..20: mol_type = other RNA
aggaaggaaggaaggaaggg

SEQ ID NO: 5632 - RNA, 20 nt, synthetic construct
  source 1..20: mol_type = other RNA
ggaaggaaggaaggaaggga

SEQ ID NO: 5633 - RNA, 20 nt, synthetic construct
  source 1..20: mol_type = other RNA
aggaaggaaggaagggaggg

SEQ ID NO: 5634 - RNA, 20 nt, synthetic construct
  source 1..20: mol_type = other RNA
ggaaggaaggaagggaggga

SEQ ID NO: 5635 - RNA, 20 nt, synthetic construct
  source 1..20: mol_type = other RNA
aggaaggaagggagggaggg

SEQ ID NO: 5636 - RNA, 20 nt, synthetic construct
  source 1..20: mol_type = other RNA
ggaaggaagggagggaggga

SEQ ID NO: 5637 - RNA, 20 nt, synthetic construct
  source 1..20: mol_type = other RNA
aggaagggagggagggaggg

SEQ ID NO: 5638 - RNA, 20 nt, synthetic construct
  source 1..20: mol_type = other RNA
ggaagggagggagggaggga

SEQ ID NO: 5639 - RNA, 20 nt, synthetic construct
  source 1..20: mol_type = other RNA
agggagggagggagggaggg

SEQ ID NO: 5640 - RNA, 20 nt, synthetic construct
  source 1..20: mol_type = other RNA
gggagggagggagggaggga

SEQ ID NO: 5641 - RNA, 20 nt, synthetic construct
  source 1..20: mol_type = other RNA
agggagggagggagggaggg

SEQ ID NO: 5642 - RNA, 20 nt, synthetic construct
  source 1..20: mol_type = other RNA
gggagggagggagggaggga

SEQ ID NO: 5643 - RNA, 20 nt, synthetic construct
  source 1..20: mol_type = other RNA
agggagggagggagggaggg

SEQ ID NO: 5644 - RNA, 20 nt, synthetic construct
  source 1..20: mol_type = other RNA
gggagggagggagggaggga

SEQ ID NO: 5645 - RNA, 20 nt, synthetic construct
  source 1..20: mol_type = other RNA
agggagggagggagggaggg

SEQ ID NO: 5646 - RNA, 20 nt, synthetic construct
  source 1..20: mol_type = other RNA
gggagggagggagggaggga

SEQ ID NO: 5647 - RNA, 20 nt, synthetic construct
  source 1..20: mol_type = other RNA
agggagggagggagggaggg

SEQ ID NO: 5648 - RNA, 20 nt, synthetic construct
  source 1..20: mol_type = other RNA
gggagggagggagggaggga

SEQ ID NO: 5649 - RNA, 20 nt, synthetic construct
  source 1..20: mol_type = other RNA
agggagggagggagggaggg

SEQ ID NO: 5650 - RNA, 20 nt, synthetic construct
  source 1..20: mol_type = other RNA
agggagggagggagggagga

SEQ ID NO: 5651 - RNA, 20 nt, synthetic construct
  source 1..20: mol_type = other RNA
gatgttgagaacaaaagcca

SEQ ID NO: 5652 - RNA, 20 nt, synthetic construct
  source 1..20: mol_type = other RNA
gaacaaaagccaaggccaac

SEQ ID NO: 5653 - RNA, 20 nt, synthetic construct
  source 1..20: mol_type = other RNA
gccaaggccaacaggtgagt

SEQ ID NO: 5654 - RNA, 20 nt, synthetic construct
  source 1..20: mol_type = other RNA
ccaaggccaacaggtgagtt

SEQ ID NO: 5655 - RNA, 20 nt, synthetic construct
  source 1..20: mol_type = other RNA
cccaactcacctgttggcct

SEQ ID NO: 5656 - RNA, 20 nt, synthetic construct
  source 1..20: mol_type = other RNA
ccaacaggtgagttgggatt

SEQ ID NO: 5657 - RNA, 20 nt, synthetic construct
  source 1..20: mol_type = other RNA
cctaatcccaactcacctgt

SEQ ID NO: 5658 - RNA, 20 nt, synthetic construct
  source 1..20: mol_type = other RNA
aaaagtccttttcatagcaa

SEQ ID NO: 5659 - RNA, 20 nt, synthetic construct
  source 1..20: mol_type = other RNA
aaagtccttttcatagcaaa

SEQ ID NO: 5660 - RNA, 20 nt, synthetic construct
  source 1..20: mol_type = other RNA
aagtccttttcatagcaaag

SEQ ID NO: 5661 - RNA, 20 nt, synthetic construct
  source 1..20: mol_type = other RNA
acatcccctttgctatgaaa

SEQ ID NO: 5662 - RNA, 20 nt, synthetic construct
  source 1..20: mol_type = other RNA
ttttcatagcaaaggggatg

SEQ ID NO: 5663 - RNA, 20 nt, synthetic construct
  source 1..20: mol_type = other RNA
gtggaagaagagaagttgac

SEQ ID NO: 5664 - RNA, 20 nt, synthetic construct
  source 1..20: mol_type = other RNA
agagaagttgacaggtaagt

SEQ ID NO: 5665 - RNA, 20 nt, synthetic construct
  source 1..20: mol_type = other RNA
gagaagttgacaggtaagta

SEQ ID NO: 5666 - RNA, 20 nt, synthetic construct
  source 1..20: mol_type = other RNA
agaaaaaagaaaaaaatctg

SEQ ID NO: 5667 - RNA, 20 nt, synthetic construct
  source 1..20: mol_type = other RNA
aagaaaaaaatctgtggacc

SEQ ID NO: 5668 - RNA, 20 nt, synthetic construct
  source 1..20: mol_type = other RNA
agaaaaaaatctgtggacca

SEQ ID NO: 5669 - RNA, 20 nt, synthetic construct
  source 1..20: mol_type = other RNA
aaaatctgtggaccagggca

SEQ ID NO: 5670 - RNA, 20 nt, synthetic construct
  source 1..20: mol_type = other RNA
ctgcgtttcttgccatgccc

SEQ ID NO: 5671 - RNA, 20 nt, synthetic construct
  source 1..20: mol_type = other RNA
gagcaaatgttcataaagag

SEQ ID NO: 5672 - RNA, 20 nt, synthetic construct
  source 1..20: mol_type = other RNA
caaatgttcataaagagagg

SEQ ID NO: 5673 - RNA, 20 nt, synthetic construct
  source 1..20: mol_type = other RNA
aaatgttcataaagagaggt

SEQ ID NO: 5674 - RNA, 20 nt, synthetic construct
  source 1..20: mol_type = other RNA
gttcataaagagaggtgggc

SEQ ID NO: 5675 - RNA, 20 nt, synthetic construct
  source 1..20: mol_type = other RNA
cataaagagaggtgggcagg

SEQ ID NO: 5676 - RNA, 20 nt, synthetic construct
  source 1..20: mol_type = other RNA
ggtgggcaggaggcagacca

SEQ ID NO: 5677 - RNA, 20 nt, synthetic construct
  source 1..20: mol_type = other RNA
tctgatgagtcttgagacca

SEQ ID NO: 5678 - RNA, 20 nt, synthetic construct
  source 1..20: mol_type = other RNA
caagactcatcagagagata

SEQ ID NO: 5679 - RNA, 20 nt, synthetic construct
  source 1..20: mol_type = other RNA
agagataaggcaatatcctg

SEQ ID NO: 5680 - RNA, 20 nt, synthetic construct
  source 1..20: mol_type = other RNA
tcctgaggagcacccatctg

SEQ ID NO: 5681 - RNA, 20 nt, synthetic construct
  source 1..20: mol_type = other RNA
cctgaggagcacccatctga

SEQ ID NO: 5682 - RNA, 20 nt, synthetic construct
  source 1..20: mol_type = other RNA
ccctcagatgggtgctcctc

SEQ ID NO: 5683 - RNA, 20 nt, synthetic construct
  source 1..20: mol_type = other RNA
ctgaggagcacccatctgag

SEQ ID NO: 5684 - RNA, 20 nt, synthetic construct
  source 1..20: mol_type = other RNA
ttgctcaacgcccctcagat

SEQ ID NO: 5685 - RNA, 20 nt, synthetic construct
  source 1..20: mol_type = other RNA
cttgctcaacgcccctcaga

SEQ ID NO: 5686 - RNA, 20 nt, synthetic construct
  source 1..20: mol_type = other RNA
tctgaggggcgttgagcaag

SEQ ID NO: 5687 - RNA, 20 nt, synthetic construct
  source 1..20: mol_type = other RNA
ctgaggggcgttgagcaagt

SEQ ID NO: 5688 - RNA, 20 nt, synthetic construct
  source 1..20: mol_type = other RNA
catttctctgcattcacaga

SEQ ID NO: 5689 - RNA, 20 nt, synthetic construct
  source 1..20: mol_type = other RNA
ttctctgcattcacagatgg

SEQ ID NO: 5690 - RNA, 20 nt, synthetic construct
  source 1..20: mol_type = other RNA
tgcaactatctttagcagtg

SEQ ID NO: 5691 - RNA, 20 nt, synthetic construct
  source 1..20: mol_type = other RNA
tctttagcagtgaggcatgc

SEQ ID NO: 5692 - RNA, 20 nt, synthetic construct
  source 1..20: mol_type = other RNA
ctttagcagtgaggcatgct

SEQ ID NO: 5693 - RNA, 20 nt, synthetic construct
  source 1..20: mol_type = other RNA
atgctgggtagtgctaagag

SEQ ID NO: 5694 - RNA, 20 nt, synthetic construct
  source 1..20: mol_type = other RNA
tgctgggtagtgctaagagc

SEQ ID NO: 5695 - RNA, 20 nt, synthetic construct
  source 1..20: mol_type = other RNA
tgggtagtgctaagagcggg

SEQ ID NO: 5696 - RNA, 20 nt, synthetic construct
  source 1..20: mol_type = other RNA
gggtagtgctaagagcgggc

SEQ ID NO: 5697 - RNA, 20 nt, synthetic construct
  source 1..20: mol_type = other RNA
ggtagtgctaagagcgggcg

SEQ ID NO: 5698 - RNA, 20 nt, synthetic construct
  source 1..20: mol_type = other RNA
ctaagagcgggcggggtctg

SEQ ID NO: 5699 - RNA, 20 nt, synthetic construct
  source 1..20: mol_type = other RNA
agcgggcggggtctgtggaa

SEQ ID NO: 5700 - RNA, 20 nt, synthetic construct
  source 1..20: mol_type = other RNA
gcggggtctgtggaatggag

SEQ ID NO: 5701 - RNA, 20 nt, synthetic construct
  source 1..20: mol_type = other RNA
aatgacgtggtaataaggag

SEQ ID NO: 5702 - RNA, 20 nt, synthetic construct
  source 1..20: mol_type = other RNA
agtaaaatgacgtggtaata

SEQ ID NO: 5703 - RNA, 20 nt, synthetic construct
  source 1..20: mol_type = other RNA
taatcaaaagtaaaatgacg

SEQ ID NO: 5704 - RNA, 20 nt, synthetic construct
  source 1..20: mol_type = other RNA
ctatgtatcttgcctcttga

SEQ ID NO: 5705 - RNA, 20 nt, synthetic construct
  source 1..20: mol_type = other RNA
gtacttgtgtgaccgtcaag

SEQ ID NO: 5706 - RNA, 20 nt, synthetic construct
  source 1..20: mol_type = other RNA
agtacttccagttgaagagt

SEQ ID NO: 5707 - RNA, 20 nt, synthetic construct
  source 1..20: mol_type = other RNA
tgtaatgcctactcttcaac

SEQ ID NO: 5708 - RNA, 20 nt, synthetic construct
  source 1..20: mol_type = other RNA
gttgaagagtaggcattaca

SEQ ID NO: 5709 - RNA, 20 nt, synthetic construct
  source 1..20: mol_type = other RNA
tctgcttccatgaatattct

SEQ ID NO: 5710 - RNA, 20 nt, synthetic construct
  source 1..20: mol_type = other RNA
ctgcttccatgaatattcta

SEQ ID NO: 5711 - RNA, 20 nt, synthetic construct
  source 1..20: mol_type = other RNA
aatgtgccctagaatattca

SEQ ID NO: 5712 - RNA, 20 nt, synthetic construct
  source 1..20: mol_type = other RNA
ctagggcacatttttattcc

SEQ ID NO: 5713 - RNA, 20 nt, synthetic construct
  source 1..20: mol_type = other RNA
tgctttcatatattttttcc

SEQ ID NO: 5714 - RNA, 20 nt, synthetic construct
  source 1..20: mol_type = other RNA
aaagcatttctaattatgaa

SEQ ID NO: 5715 - RNA, 20 nt, synthetic construct
  source 1..20: mol_type = other RNA
tttctaattatgaatggaat

SEQ ID NO: 5716 - RNA, 20 nt, synthetic construct
  source 1..20: mol_type = other RNA
ctaattatgaatggaattgg

SEQ ID NO: 5717 - RNA, 20 nt, synthetic construct
  source 1..20: mol_type = other RNA
tgaatggaattggtggttta

SEQ ID NO: 5718 - RNA, 20 nt, synthetic construct
  source 1..20: mol_type = other RNA
gaatggaattggtggtttat

SEQ ID NO: 5719 - RNA, 20 nt, synthetic construct
  source 1..20: mol_type = other RNA
aatggaattggtggtttatg

SEQ ID NO: 5720 - RNA, 20 nt, synthetic construct
  source 1..20: mol_type = other RNA
ggaacacatatgctcagcct

SEQ ID NO: 5721 - RNA, 20 nt, synthetic construct
  source 1..20: mol_type = other RNA
ggttttggtaatttattcca

SEQ ID NO: 5722 - RNA, 20 nt, synthetic construct
  source 1..20: mol_type = other RNA
ataaattaccaaaaccaaag

SEQ ID NO: 5723 - RNA, 20 nt, synthetic construct
  source 1..20: mol_type = other RNA
gagtctagcctctttggttt

SEQ ID NO: 5724 - RNA, 20 nt, synthetic construct
  source 1..20: mol_type = other RNA
agaagggagtctagcctctt

SEQ ID NO: 5725 - RNA, 20 nt, synthetic construct
  source 1..20: mol_type = other RNA
gcttctgttgatcggtagaa

SEQ ID NO: 5726 - RNA, 20 nt, synthetic construct
  source 1..20: mol_type = other RNA
tgcttctgttgatcggtaga

SEQ ID NO: 5727 - RNA, 20 nt, synthetic construct
  source 1..20: mol_type = other RNA
tcttatatgcttctgttgat

SEQ ID NO: 5728 - RNA, 20 nt, synthetic construct
  source 1..20: mol_type = other RNA
caacagaagcatataagagt

SEQ ID NO: 5729 - RNA, 20 nt, synthetic construct
  source 1..20: mol_type = other RNA
ttctctactctaccaacttg

SEQ ID NO: 5730 - RNA, 20 nt, synthetic construct
  source 1..20: mol_type = other RNA
ctactctaccaacttgtggt

SEQ ID NO: 5731 - RNA, 20 nt, synthetic construct
  source 1..20: mol_type = other RNA
tactctaccaacttgtggtt

SEQ ID NO: 5732 - RNA, 20 nt, synthetic construct
  source 1..20: mol_type = other RNA
aacaggacccaaccacaagt

SEQ ID NO: 5733 - RNA, 20 nt, synthetic construct
  source 1..20: mol_type = other RNA
gtcctgtttagaataataag

SEQ ID NO: 5734 - RNA, 20 nt, synthetic construct
  source 1..20: mol_type = other RNA
tgcctcttattattctaaac

SEQ ID NO: 5735 - RNA, 20 nt, synthetic construct
  source 1..20: mol_type = other RNA
gcatctacatgtagagctct

SEQ ID NO: 5736 - RNA, 20 nt, synthetic construct
  source 1..20: mol_type = other RNA
tctaggaagccattcaatgc

SEQ ID NO: 5737 - RNA, 20 nt, synthetic construct
  source 1..20: mol_type = other RNA
ggtttagatcctgcattgaa

SEQ ID NO: 5738 - RNA, 20 nt, synthetic construct
  source 1..20: mol_type = other RNA
tcaatgcaggatctaaacct

SEQ ID NO: 5739 - RNA, 20 nt, synthetic construct
  source 1..20: mol_type = other RNA
cacagacattgctaaagcca

SEQ ID NO: 5740 - RNA, 20 nt, synthetic construct
  source 1..20: mol_type = other RNA
tggctttagcaatgtctgtg

SEQ ID NO: 5741 - RNA, 20 nt, synthetic construct
  source 1..20: mol_type = other RNA
agcaatgtctgtgcggtact

SEQ ID NO: 5742 - RNA, 20 nt, synthetic construct
  source 1..20: mol_type = other RNA
caaagaaaaccaagatttat

SEQ ID NO: 5743 - RNA, 20 nt, synthetic construct
  source 1..20: mol_type = other RNA
aaaaccaagatttatcggaa

SEQ ID NO: 5744 - RNA, 20 nt, synthetic construct
  source 1..20: mol_type = other RNA
accaagatttatcggaatgg

SEQ ID NO: 5745 - RNA, 20 nt, synthetic construct
  source 1..20: mol_type = other RNA
tccaccattccgataaatct

SEQ ID NO: 5746 - RNA, 20 nt, synthetic construct
  source 1..20: mol_type = other RNA
ggtggacactgaaagtagac

SEQ ID NO: 5747 - RNA, 20 nt, synthetic construct
  source 1..20: mol_type = other RNA
acactgaaagtagacaggaa

SEQ ID NO: 5748 - RNA, 20 nt, synthetic construct
  source 1..20: mol_type = other RNA
cctagtgtgcagtgtgcaga

SEQ ID NO: 5749 - RNA, 20 nt, synthetic construct
  source 1..20: mol_type = other RNA
ccatctgcacactgcacact

SEQ ID NO: 5750 - RNA, 20 nt, synthetic construct
  source 1..20: mol_type = other RNA
gtgtgcagtgtgcagatgga

SEQ ID NO: 5751 - RNA, 20 nt, synthetic construct
  source 1..20: mol_type = other RNA
tgtgcagtgtgcagatggaa

SEQ ID NO: 5752 - RNA, 20 nt, synthetic construct
  source 1..20: mol_type = other RNA
tgcagatggaagggcagtgc

SEQ ID NO: 5753 - RNA, 20 nt, synthetic construct
  source 1..20: mol_type = other RNA
gcagatggaagggcagtgct

SEQ ID NO: 5754 - RNA, 20 nt, synthetic construct
  source 1..20: mol_type = other RNA
cagatggaagggcagtgctg

SEQ ID NO: 5755 - RNA, 20 nt, synthetic construct
  source 1..20: mol_type = other RNA
tggggagaatccattgcatt

SEQ ID NO: 5756 - RNA, 20 nt, synthetic construct
  source 1..20: mol_type = other RNA
cttcttctttccaaatgcaa

SEQ ID NO: 5757 - RNA, 20 nt, synthetic construct
  source 1..20: mol_type = other RNA
ttagcaaaagaaatcgcaga

SEQ ID NO: 5758 - RNA, 20 nt, synthetic construct
  source 1..20: mol_type = other RNA
attagcaaaagaaatcgcag

SEQ ID NO: 5759 - RNA, 20 nt, synthetic construct
  source 1..20: mol_type = other RNA
gcgatttcttttgctaatgc

SEQ ID NO: 5760 - RNA, 20 nt, synthetic construct
  source 1..20: mol_type = other RNA
aagcaagtactacagtgaaa

SEQ ID NO: 5761 - RNA, 20 nt, synthetic construct
  source 1..20: mol_type = other RNA
ttcactgtagtacttgcttg

SEQ ID NO: 5762 - RNA, 20 nt, synthetic construct
  source 1..20: mol_type = other RNA
actgtagtacttgcttgtgg

SEQ ID NO: 5763 - RNA, 20 nt, synthetic construct
  source 1..20: mol_type = other RNA
tgtggtggtttgaatgaaaa

SEQ ID NO: 5764 - RNA, 20 nt, synthetic construct
  source 1..20: mol_type = other RNA
tgaatgaaaatggtccccac

SEQ ID NO: 5765 - RNA, 20 nt, synthetic construct
  source 1..20: mol_type = other RNA
gttttcaaaaatagcctgtg

SEQ ID NO: 5766 - RNA, 20 nt, synthetic construct
  source 1..20: mol_type = other RNA
agttttcaaaaatagcctgt

SEQ ID NO: 5767 - RNA, 20 nt, synthetic construct
  source 1..20: mol_type = other RNA
aagttttcaaaaatagcctg

SEQ ID NO: 5768 - RNA, 20 nt, synthetic construct
  source 1..20: mol_type = other RNA
ttgaaaacttgatccccagt

SEQ ID NO: 5769 - RNA, 20 nt, synthetic construct
  source 1..20: mol_type = other RNA
ccccagttggtgaaactgtt

SEQ ID NO: 5770 - RNA, 20 nt, synthetic construct
  source 1..20: mol_type = other RNA
ccaaacagtttcaccaactg

SEQ ID NO: 5771 - RNA, 20 nt, synthetic construct
  source 1..20: mol_type = other RNA
tccaaacagtttcaccaact

SEQ ID NO: 5772 - RNA, 20 nt, synthetic construct
  source 1..20: mol_type = other RNA
ttccaaacagtttcaccaac

SEQ ID NO: 5773 - RNA, 20 nt, synthetic construct
  source 1..20: mol_type = other RNA
gttggtgaaactgtttggaa

SEQ ID NO: 5774 - RNA, 20 nt, synthetic construct
  source 1..20: mol_type = other RNA
gaaactgtttggaaaggatt

SEQ ID NO: 5775 - RNA, 20 nt, synthetic construct
  source 1..20: mol_type = other RNA
ttggaaaggattaggaagtg

SEQ ID NO: 5776 - RNA, 20 nt, synthetic construct
  source 1..20: mol_type = other RNA
attaggaagtgtggccttgc

SEQ ID NO: 5777 - RNA, 20 nt, synthetic construct
  source 1..20: mol_type = other RNA
aagtgtggccttgctggatg

SEQ ID NO: 5778 - RNA, 20 nt, synthetic construct
  source 1..20: mol_type = other RNA
ttgacagacctcatccagca

SEQ ID NO: 5779 - RNA, 20 nt, synthetic construct
  source 1..20: mol_type = other RNA
tgctggatgaggtctgtcaa

SEQ ID NO: 5780 - RNA, 20 nt, synthetic construct
  source 1..20: mol_type = other RNA
tggatgaggtctgtcaatgg

SEQ ID NO: 5781 - RNA, 20 nt, synthetic construct
  source 1..20: mol_type = other RNA
tgaggtctgtcaatggcgga

SEQ ID NO: 5782 - RNA, 20 nt, synthetic construct
  source 1..20: mol_type = other RNA
gagacagagagaggcacact

SEQ ID NO: 5783 - RNA, 20 nt, synthetic construct
  source 1..20: mol_type = other RNA
ggagacagagagaggcacac

SEQ ID NO: 5784 - RNA, 20 nt, synthetic construct
  source 1..20: mol_type = other RNA
aataagtaggagacagagag

SEQ ID NO: 5785 - RNA, 20 nt, synthetic construct
  source 1..20: mol_type = other RNA
tcatttttcaatcaataagt

SEQ ID NO: 5786 - RNA, 20 nt, synthetic construct
  source 1..20: mol_type = other RNA
aattctggatggcagagcaa

SEQ ID NO: 5787 - RNA, 20 nt, synthetic construct
  source 1..20: mol_type = other RNA
tgggtgattagaattctgga

SEQ ID NO: 5788 - RNA, 20 nt, synthetic construct
  source 1..20: mol_type = other RNA
gttttgggtgattagaattc

SEQ ID NO: 5789 - RNA, 20 nt, synthetic construct
  source 1..20: mol_type = other RNA
taattaggctatatggtttt

SEQ ID NO: 5790 - RNA, 20 nt, synthetic construct
  source 1..20: mol_type = other RNA
ttaattaggctatatggttt

SEQ ID NO: 5791 - RNA, 20 nt, synthetic construct
  source 1..20: mol_type = other RNA
cagtatttaattaggctata

SEQ ID NO: 5792 - RNA, 20 nt, synthetic construct
  source 1..20: mol_type = other RNA
tataaaaacagtatttaatt

SEQ ID NO: 5793 - RNA, 20 nt, synthetic construct
  source 1..20: mol_type = other RNA
actgtttttataagttacct

SEQ ID NO: 5794 - RNA, 20 nt, synthetic construct
  source 1..20: mol_type = other RNA
tttataagttaccttggtca

SEQ ID NO: 5795 - RNA, 20 nt, synthetic construct
  source 1..20: mol_type = other RNA
taccttggtcatggtacttt

SEQ ID NO: 5796 - RNA, 20 nt, synthetic construct
  source 1..20: mol_type = other RNA
atcctaaagtaccatgacca

SEQ ID NO: 5797 - RNA, 20 nt, synthetic construct
  source 1..20: mol_type = other RNA
tagttaagaaactaagacat

SEQ ID NO: 5798 - RNA, 20 nt, synthetic construct
  source 1..20: mol_type = other RNA
cttaaccaaaacaccacaga

SEQ ID NO: 5799 - RNA, 20 nt, synthetic construct
  source 1..20: mol_type = other RNA
ttaaccaaaacaccacagac

SEQ ID NO: 5800 - RNA, 20 nt, synthetic construct
  source 1..20: mol_type = other RNA
caagcccgtctgtggtgttt

SEQ ID NO: 5801 - RNA, 20 nt, synthetic construct
  source 1..20: mol_type = other RNA
gtcatatgcaagcccgtctg

SEQ ID NO: 5802 - RNA, 20 nt, synthetic construct
  source 1..20: mol_type = other RNA
gcatatgacaacagttctag

SEQ ID NO: 5803 - RNA, 20 nt, synthetic construct
  source 1..20: mol_type = other RNA
ccctgatcaaatgccctagc

SEQ ID NO: 5804 - RNA, 20 nt, synthetic construct
  source 1..20: mol_type = other RNA
cctgctagggcatttgatca

SEQ ID NO: 5805 - RNA, 20 nt, synthetic construct
  source 1..20: mol_type = other RNA
acctgctagggcatttgatc

SEQ ID NO: 5806 - RNA, 20 nt, synthetic construct
  source 1..20: mol_type = other RNA
atcagacacagaacctgcta

SEQ ID NO: 5807 - RNA, 20 nt, synthetic construct
  source 1..20: mol_type = other RNA
catcagacacagaacctgct

SEQ ID NO: 5808 - RNA, 20 nt, synthetic construct
  source 1..20: mol_type = other RNA
agcaggttctgtgtctgatg

SEQ ID NO: 5809 - RNA, 20 nt, synthetic construct
  source 1..20: mol_type = other RNA
gcaggttctgtgtctgatga

SEQ ID NO: 5810 - RNA, 20 nt, synthetic construct
  source 1..20: mol_type = other RNA
ctgtgtctgatgagggctgc

SEQ ID NO: 5811 - RNA, 20 nt, synthetic construct
  source 1..20: mol_type = other RNA
tgatgagggctgctggttca

SEQ ID NO: 5812 - RNA, 20 nt, synthetic construct
  source 1..20: mol_type = other RNA
gatgagggctgctggttcat

SEQ ID NO: 5813 - RNA, 20 nt, synthetic construct
  source 1..20: mol_type = other RNA
gagggctgctggttcatggg

SEQ ID NO: 5814 - RNA, 20 nt, synthetic construct
  source 1..20: mol_type = other RNA
ctttttctcagtgtccttac

SEQ ID NO: 5815 - RNA, 20 nt, synthetic construct
  source 1..20: mol_type = other RNA
tttctcagtgtccttacagg

SEQ ID NO: 5816 - RNA, 20 nt, synthetic construct
  source 1..20: mol_type = other RNA
tcagtgtccttacaggtgga

SEQ ID NO: 5817 - RNA, 20 nt, synthetic construct
  source 1..20: mol_type = other RNA
ctggataccttccacctgta

SEQ ID NO: 5818 - RNA, 20 nt, synthetic construct
  source 1..20: mol_type = other RNA
tggaaggtatccagctttct

SEQ ID NO: 5819 - RNA, 20 nt, synthetic construct
  source 1..20: mol_type = other RNA
aatataaggtccaagaaagc

SEQ ID NO: 5820 - RNA, 20 nt, synthetic construct
  source 1..20: mol_type = other RNA
ggaatgcgtgctttaatata

SEQ ID NO: 5821 - RNA, 20 nt, synthetic construct
  source 1..20: mol_type = other RNA
aagctatctactcacatcaa

SEQ ID NO: 5822 - RNA, 20 nt, synthetic construct
  source 1..20: mol_type = other RNA
gaggtgcttaaatcactttg

SEQ ID NO: 5823 - RNA, 20 nt, synthetic construct
  source 1..20: mol_type = other RNA
ggaggtgcttaaatcacttt

SEQ ID NO: 5824 - RNA, 20 nt, synthetic construct
  source 1..20: mol_type = other RNA
tggaggtgcttaaatcactt

SEQ ID NO: 5825 - RNA, 20 nt, synthetic construct
  source 1..20: mol_type = other RNA
cctccaaaaccctccgtctc

SEQ ID NO: 5826 - RNA, 20 nt, synthetic construct
  source 1..20: mol_type = other RNA
ccggagacggagggttttgg

SEQ ID NO: 5827 - RNA, 20 nt, synthetic construct
  source 1..20: mol_type = other RNA
catccggagacggagggttt

SEQ ID NO: 5828 - RNA, 20 nt, synthetic construct
  source 1..20: mol_type = other RNA
ggggagcatccggagacgga

SEQ ID NO: 5829 - RNA, 20 nt, synthetic construct
  source 1..20: mol_type = other RNA
gggggagcatccggagacgg

SEQ ID NO: 5830 - RNA, 20 nt, synthetic construct
  source 1..20: mol_type = other RNA
aatgggggagcatccggaga

SEQ ID NO: 5831 - RNA, 20 nt, synthetic construct
  source 1..20: mol_type = other RNA
gtctccggatgctcccccat

SEQ ID NO: 5832 - RNA, 20 nt, synthetic construct
  source 1..20: mol_type = other RNA
ttcaccaatgggggagcatc

SEQ ID NO: 5833 - RNA, 20 nt, synthetic construct
  source 1..20: mol_type = other RNA
tgaaatctgttcaccaatgg

SEQ ID NO: 5834 - RNA, 20 nt, synthetic construct
  source 1..20: mol_type = other RNA
ttgaaatctgttcaccaatg

SEQ ID NO: 5835 - RNA, 20 nt, synthetic construct
  source 1..20: mol_type = other RNA
gttgaaatctgttcaccaat

SEQ ID NO: 5836 - RNA, 20 nt, synthetic construct
  source 1..20: mol_type = other RNA
tgttgaaatctgttcaccaa

SEQ ID NO: 5837 - RNA, 20 nt, synthetic construct
  source 1..20: mol_type = other RNA
tttcaacatagcaattgagc

SEQ ID NO: 5838 - RNA, 20 nt, synthetic construct
  source 1..20: mol_type = other RNA
caacatagcaattgagcagg

SEQ ID NO: 5839 - RNA, 20 nt, synthetic construct
  source 1..20: mol_type = other RNA
tagcaattgagcaggaggaa

SEQ ID NO: 5840 - RNA, 20 nt, synthetic construct
  source 1..20: mol_type = other RNA
ctggctgtgatcaaataatt

SEQ ID NO: 5841 - RNA, 20 nt, synthetic construct
  source 1..20: mol_type = other RNA
tttgatcacagccagtactt

SEQ ID NO: 5842 - RNA, 20 nt, synthetic construct
  source 1..20: mol_type = other RNA
ttgggtgttcaccaaagtac

SEQ ID NO: 5843 - RNA, 20 nt, synthetic construct
  source 1..20: mol_type = other RNA
gtgaacacccaaacccagca

SEQ ID NO: 5844 - RNA, 20 nt, synthetic construct
  source 1..20: mol_type = other RNA
ttcagctccatgctgggttt

SEQ ID NO: 5845 - RNA, 20 nt, synthetic construct
  source 1..20: mol_type = other RNA
attcagctccatgctgggtt

SEQ ID NO: 5846 - RNA, 20 nt, synthetic construct
  source 1..20: mol_type = other RNA
cagatattcagctccatgct

SEQ ID NO: 5847 - RNA, 20 nt, synthetic construct
  source 1..20: mol_type = other RNA
acagatattcagctccatgc

SEQ ID NO: 5848 - RNA, 20 nt, synthetic construct
  source 1..20: mol_type = other RNA
ctgtaatctcagtatccagc

SEQ ID NO: 5849 - RNA, 20 nt, synthetic construct
  source 1..20: mol_type = other RNA
taatctcagtatccagcagg

SEQ ID NO: 5850 - RNA, 20 nt, synthetic construct
  source 1..20: mol_type = other RNA
agtatccagcaggtggatat

SEQ ID NO: 5851 - RNA, 20 nt, synthetic construct
  source 1..20: mol_type = other RNA
gtatccagcaggtggatatt

SEQ ID NO: 5852 - RNA, 20 nt, synthetic construct
  source 1..20: mol_type = other RNA
tatccagcaggtggatattg

SEQ ID NO: 5853 - RNA, 20 nt, synthetic construct
  source 1..20: mol_type = other RNA
attccccaatatccacctgc

SEQ ID NO: 5854 - RNA, 20 nt, synthetic construct
  source 1..20: mol_type = other RNA
attggggaattaagacttca

SEQ ID NO: 5855 - RNA, 20 nt, synthetic construct
  source 1..20: mol_type = other RNA
taagacttcaaggccagact

SEQ ID NO: 5856 - RNA, 20 nt, synthetic construct
  source 1..20: mol_type = other RNA
acttactatgtagccaagtc

SEQ ID NO: 5857 - RNA, 20 nt, synthetic construct
  source 1..20: mol_type = other RNA
tagtaagtttgatgccatcc

SEQ ID NO: 5858 - RNA, 20 nt, synthetic construct
  source 1..20: mol_type = other RNA
agtaagtttgatgccatcct

SEQ ID NO: 5859 - RNA, 20 nt, synthetic construct
  source 1..20: mol_type = other RNA
ggatctcatatagcccagga

SEQ ID NO: 5860 - RNA, 20 nt, synthetic construct
  source 1..20: mol_type = other RNA
aacaggatctcatatagccc

SEQ ID NO: 5861 - RNA, 20 nt, synthetic construct
  source 1..20: mol_type = other RNA
tatttgggggttttggaaac

SEQ ID NO: 5862 - RNA, 20 nt, synthetic construct
  source 1..20: mol_type = other RNA
ttgtttctatttgggggttt

SEQ ID NO: 5863 - RNA, 20 nt, synthetic construct
  source 1..20: mol_type = other RNA
tttttattgtttctatttgg

SEQ ID NO: 5864 - RNA, 20 nt, synthetic construct
  source 1..20: mol_type = other RNA
ttttttattgtttctatttg

SEQ ID NO: 5865 - RNA, 20 nt, synthetic construct
  source 1..20: mol_type = other RNA
tttttttattgtttctattt

SEQ ID NO: 5866 - RNA, 20 nt, synthetic construct
  source 1..20: mol_type = other RNA
atttttttattgtttctatt

SEQ ID NO: 5867 - RNA, 20 nt, synthetic construct
  source 1..20: mol_type = other RNA
aaatagaaacaataaaaaaa

SEQ ID NO: 5868 - RNA, 20 nt, synthetic construct
  source 1..20: mol_type = other RNA
tagggtagcagtgaacatga

SEQ ID NO: 5869 - RNA, 20 nt, synthetic construct
  source 1..20: mol_type = other RNA
atgttcactgctaccctaga

SEQ ID NO: 5870 - RNA, 20 nt, synthetic construct
  source 1..20: mol_type = other RNA
caagcaaaactgaccttcta

SEQ ID NO: 5871 - RNA, 20 nt, synthetic construct
  source 1..20: mol_type = other RNA
acaagcaaaactgaccttct

SEQ ID NO: 5872 - RNA, 20 nt, synthetic construct
  source 1..20: mol_type = other RNA
ttgtaacagatgactaacag

SEQ ID NO: 5873 - RNA, 20 nt, synthetic construct
  source 1..20: mol_type = other RNA
agatgactaacagaggaaca

SEQ ID NO: 5874 - RNA, 20 nt, synthetic construct
  source 1..20: mol_type = other RNA
ctaacagaggaacaaggtcc

SEQ ID NO: 5875 - RNA, 20 nt, synthetic construct
  source 1..20: mol_type = other RNA
agcatactggtagctcttcc

SEQ ID NO: 5876 - RNA, 20 nt, synthetic construct
  source 1..20: mol_type = other RNA
cagcatactggtagctcttc

SEQ ID NO: 5877 - RNA, 20 nt, synthetic construct
  source 1..20: mol_type = other RNA
cggaagagctaccagtatgc

SEQ ID NO: 5878 - RNA, 20 nt, synthetic construct
  source 1..20: mol_type = other RNA
ttcattggcagccagcatac

SEQ ID NO: 5879 - RNA, 20 nt, synthetic construct
  source 1..20: mol_type = other RNA
taagacttcagcagcttcat

SEQ ID NO: 5880 - RNA, 20 nt, synthetic construct
  source 1..20: mol_type = other RNA
gctgaagtcttagtagattt

SEQ ID NO: 5881 - RNA, 20 nt, synthetic construct
  source 1..20: mol_type = other RNA
cttagtagatttaggagcta

SEQ ID NO: 5882 - RNA, 20 nt, synthetic construct
  source 1..20: mol_type = other RNA
ctggggctgtgatggaagtc

SEQ ID NO: 5883 - RNA, 20 nt, synthetic construct
  source 1..20: mol_type = other RNA
tggtggtgctggggctgtga

SEQ ID NO: 5884 - RNA, 20 nt, synthetic construct
  source 1..20: mol_type = other RNA
tcacagccccagcaccacca

SEQ ID NO: 5885 - RNA, 20 nt, synthetic construct
  source 1..20: mol_type = other RNA
cacagccccagcaccaccat

SEQ ID NO: 5886 - RNA, 20 nt, synthetic construct
  source 1..20: mol_type = other RNA
cagtgcccatggtggtgctg

SEQ ID NO: 5887 - RNA, 20 nt, synthetic construct
  source 1..20: mol_type = other RNA
gcagtgcccatggtggtgct

SEQ ID NO: 5888 - RNA, 20 nt, synthetic construct
  source 1..20: mol_type = other RNA
ggcagtgcccatggtggtgc

SEQ ID NO: 5889 - RNA, 20 nt, synthetic construct
  source 1..20: mol_type = other RNA
ctgctgggcagtgcccatgg

SEQ ID NO: 5890 - RNA, 20 nt, synthetic construct
  source 1..20: mol_type = other RNA
agactgctgggcagtgccca

SEQ ID NO: 5891 - RNA, 20 nt, synthetic construct
  source 1..20: mol_type = other RNA
ctaaaagaagatagactgct

SEQ ID NO: 5892 - RNA, 20 nt, synthetic construct
  source 1..20: mol_type = other RNA
ccagcagtctatcttctttt

SEQ ID NO: 5893 - RNA, 20 nt, synthetic construct
  source 1..20: mol_type = other RNA
cctaaaagaagatagactgc

SEQ ID NO: 5894 - RNA, 20 nt, synthetic construct
  source 1..20: mol_type = other RNA
ctatcttcttttaggtcttc

SEQ ID NO: 5895 - RNA, 20 nt, synthetic construct
  source 1..20: mol_type = other RNA
tttaggtcttcaggtgtccc

SEQ ID NO: 5896 - RNA, 20 nt, synthetic construct
  source 1..20: mol_type = other RNA
ttaggtcttcaggtgtccct

SEQ ID NO: 5897 - RNA, 20 nt, synthetic construct
  source 1..20: mol_type = other RNA
gtgtccctgggtagagaaca

SEQ ID NO: 5898 - RNA, 20 nt, synthetic construct
  source 1..20: mol_type = other RNA
gaagccttgttctctaccca

SEQ ID NO: 5899 - RNA, 20 nt, synthetic construct
  source 1..20: mol_type = other RNA
agaagccttgttctctaccc

SEQ ID NO: 5900 - RNA, 20 nt, synthetic construct
  source 1..20: mol_type = other RNA
aacaaggcttctgcttgcat

SEQ ID NO: 5901 - RNA, 20 nt, synthetic construct
  source 1..20: mol_type = other RNA
acaaggcttctgcttgcata

SEQ ID NO: 5902 - RNA, 20 nt, synthetic construct
  source 1..20: mol_type = other RNA
gtgagactgtcactgtactg

SEQ ID NO: 5903 - RNA, 20 nt, synthetic construct
  source 1..20: mol_type = other RNA
tgtgagactgtcactgtact

SEQ ID NO: 5904 - RNA, 20 nt, synthetic construct
  source 1..20: mol_type = other RNA
ttgtgagactgtcactgtac

SEQ ID NO: 5905 - RNA, 20 nt, synthetic construct
  source 1..20: mol_type = other RNA
tcacaatgagtgcagcaatg

SEQ ID NO: 5906 - RNA, 20 nt, synthetic construct
  source 1..20: mol_type = other RNA
gcagcaatgtggccacagaa

SEQ ID NO: 5907 - RNA, 20 nt, synthetic construct
  source 1..20: mol_type = other RNA
cagcaatgtggccacagaac

SEQ ID NO: 5908 - RNA, 20 nt, synthetic construct
  source 1..20: mol_type = other RNA
agcaatgtggccacagaacg

SEQ ID NO: 5909 - RNA, 20 nt, synthetic construct
  source 1..20: mol_type = other RNA
acacacatttccccgttctg

SEQ ID NO: 5910 - RNA, 20 nt, synthetic construct
  source 1..20: mol_type = other RNA
tcaagctgaaagcttttcac

SEQ ID NO: 5911 - RNA, 20 nt, synthetic construct
  source 1..20: mol_type = other RNA
tctcttgctaaatgacaaag

SEQ ID NO: 5912 - RNA, 20 nt, synthetic construct
  source 1..20: mol_type = other RNA
ctaaatgacaaagtggttag

SEQ ID NO: 5913 - RNA, 20 nt, synthetic construct
  source 1..20: mol_type = other RNA
aatgacaaagtggttagagg

SEQ ID NO: 5914 - RNA, 20 nt, synthetic construct
  source 1..20: mol_type = other RNA
atgacaaagtggttagagga

SEQ ID NO: 5915 - RNA, 20 nt, synthetic construct
  source 1..20: mol_type = other RNA
gtgtagacaatgaaagctgt

SEQ ID NO: 5916 - RNA, 20 nt, synthetic construct
  source 1..20: mol_type = other RNA
agctttcattgtctacactc

SEQ ID NO: 5917 - RNA, 20 nt, synthetic construct
  source 1..20: mol_type = other RNA
tcttttgagaattttacagt

SEQ ID NO: 5918 - RNA, 20 nt, synthetic construct
  source 1..20: mol_type = other RNA
ctagtcaacacagaaataaa

SEQ ID NO: 5919 - RNA, 20 nt, synthetic construct
  source 1..20: mol_type = other RNA
tttgttttgttgaaaagaag

SEQ ID NO: 5920 - RNA, 20 nt, synthetic construct
  source 1..20: mol_type = other RNA
ttgttttgttgaaaagaagt

SEQ ID NO: 5921 - RNA, 20 nt, synthetic construct
  source 1..20: mol_type = other RNA
tgttttgttgaaaagaagtg

SEQ ID NO: 5922 - RNA, 20 nt, synthetic construct
  source 1..20: mol_type = other RNA
gttttgttgaaaagaagtgg

SEQ ID NO: 5923 - RNA, 20 nt, synthetic construct
  source 1..20: mol_type = other RNA
ttgaaaagaagtgggggttt

SEQ ID NO: 5924 - RNA, 20 nt, synthetic construct
  source 1..20: mol_type = other RNA
tgggggttttggtactgatg

SEQ ID NO: 5925 - RNA, 20 nt, synthetic construct
  source 1..20: mol_type = other RNA
gggggttttggtactgatga

SEQ ID NO: 5926 - RNA, 20 nt, synthetic construct
  source 1..20: mol_type = other RNA
ggggttttggtactgatgag

SEQ ID NO: 5927 - RNA, 20 nt, synthetic construct
  source 1..20: mol_type = other RNA
tatgttacttattcattctc

SEQ ID NO: 5928 - RNA, 20 nt, synthetic construct
  source 1..20: mol_type = other RNA
cttattcattctcaggttca

SEQ ID NO: 5929 - RNA, 20 nt, synthetic construct
  source 1..20: mol_type = other RNA
ttaatctatcatttgtcata

SEQ ID NO: 5930 - RNA, 20 nt, synthetic construct
  source 1..20: mol_type = other RNA
taataaaagcatgcaaatgc

SEQ ID NO: 5931 - RNA, 20 nt, synthetic construct
  source 1..20: mol_type = other RNA
tgcaaatgctggagctctgc

SEQ ID NO: 5932 - RNA, 20 nt, synthetic construct
  source 1..20: mol_type = other RNA
aaatgctggagctctgctgg

SEQ ID NO: 5933 - RNA, 20 nt, synthetic construct
  source 1..20: mol_type = other RNA
ggcggagtacctgatatgca

SEQ ID NO: 5934 - RNA, 20 nt, synthetic construct
  source 1..20: mol_type = other RNA
gatcttcatccttgcatatc

SEQ ID NO: 5935 - RNA, 20 nt, synthetic construct
  source 1..20: mol_type = other RNA
gcttttttatttgatttctg

SEQ ID NO: 5936 - RNA, 20 nt, synthetic construct
  source 1..20: mol_type = other RNA
agcttttttatttgatttct

SEQ ID NO: 5937 - RNA, 20 nt, synthetic construct
  source 1..20: mol_type = other RNA
cagcttttttatttgatttc

SEQ ID NO: 5938 - RNA, 20 nt, synthetic construct
  source 1..20: mol_type = other RNA
cagaaatcaaataaaaaagc

SEQ ID NO: 5939 - RNA, 20 nt, synthetic construct
  source 1..20: mol_type = other RNA
agaaatcaaataaaaaagct

SEQ ID NO: 5940 - RNA, 20 nt, synthetic construct
  source 1..20: mol_type = other RNA
taaaaaagctgggcatagtg

SEQ ID NO: 5941 - RNA, 20 nt, synthetic construct
  source 1..20: mol_type = other RNA
agctgggcatagtgaggaag

SEQ ID NO: 5942 - RNA, 20 nt, synthetic construct
  source 1..20: mol_type = other RNA
gcatagtgaggaagaggaga

SEQ ID NO: 5943 - RNA, 20 nt, synthetic construct
  source 1..20: mol_type = other RNA
catagtgaggaagaggagat

SEQ ID NO: 5944 - RNA, 20 nt, synthetic construct
  source 1..20: mol_type = other RNA
agtgaggaagaggagatggg

SEQ ID NO: 5945 - RNA, 20 nt, synthetic construct
  source 1..20: mol_type = other RNA
aggagatgggaggattcctg

SEQ ID NO: 5946 - RNA, 20 nt, synthetic construct
  source 1..20: mol_type = other RNA
gatgggaggattcctgtggc

SEQ ID NO: 5947 - RNA, 20 nt, synthetic construct
  source 1..20: mol_type = other RNA
ggaggattcctgtggctggc

SEQ ID NO: 5948 - RNA, 20 nt, synthetic construct
  source 1..20: mol_type = other RNA
ttagctgtccagccagccac

SEQ ID NO: 5949 - RNA, 20 nt, synthetic construct
  source 1..20: mol_type = other RNA
tggaaatagatgaataggct

SEQ ID NO: 5950 - RNA, 20 nt, synthetic construct
  source 1..20: mol_type = other RNA
tagcctattcatctatttcc

SEQ ID NO: 5951 - RNA, 20 nt, synthetic construct
  source 1..20: mol_type = other RNA
tggcctggaaatagatgaat

SEQ ID NO: 5952 - RNA, 20 nt, synthetic construct
  source 1..20: mol_type = other RNA
catctatttccaggccacta

SEQ ID NO: 5953 - RNA, 20 nt, synthetic construct
  source 1..20: mol_type = other RNA
atctatttccaggccactaa

SEQ ID NO: 5954 - RNA, 20 nt, synthetic construct
  source 1..20: mol_type = other RNA
atttccaggccactaaggga

SEQ ID NO: 5955 - RNA, 20 nt, synthetic construct
  source 1..20: mol_type = other RNA
ggtaccatcccttagtggcc

SEQ ID NO: 5956 - RNA, 20 nt, synthetic construct
  source 1..20: mol_type = other RNA
tttaaggtaccatcccttag

SEQ ID NO: 5957 - RNA, 20 nt, synthetic construct
  source 1..20: mol_type = other RNA
attattattgttatttttta

SEQ ID NO: 5958 - RNA, 20 nt, synthetic construct
  source 1..20: mol_type = other RNA
acaataataataaataaaaa

SEQ ID NO: 5959 - RNA, 20 nt, synthetic construct
  source 1..20: mol_type = other RNA
taataaataaaaaaggtagc

SEQ ID NO: 5960 - RNA, 20 nt, synthetic construct
  source 1..20: mol_type = other RNA
aaaaaggtagctggttcctg

SEQ ID NO: 5961 - RNA, 20 nt, synthetic construct
  source 1..20: mol_type = other RNA
tggttcctgaggagcatcta

SEQ ID NO: 5962 - RNA, 20 nt, synthetic construct
  source 1..20: mol_type = other RNA
gatatccttagatgctcctc

SEQ ID NO: 5963 - RNA, 20 nt, synthetic construct
  source 1..20: mol_type = other RNA
gtatgtgcacgtggagttaa

SEQ ID NO: 5964 - RNA, 20 nt, synthetic construct
  source 1..20: mol_type = other RNA
gtatacagtgtatgtgcacg

SEQ ID NO: 5965 - RNA, 20 nt, synthetic construct
  source 1..20: mol_type = other RNA
tgcacatacactgtatacac

SEQ ID NO: 5966 - RNA, 20 nt, synthetic construct
  source 1..20: mol_type = other RNA
tttttttggtaaaacttgat

SEQ ID NO: 5967 - RNA, 20 nt, synthetic construct
  source 1..20: mol_type = other RNA
tttttttttttttttttttt

SEQ ID NO: 5968 - RNA, 20 nt, synthetic construct
  source 1..20: mol_type = other RNA
aagaacactttattcactgt

SEQ ID NO: 5969 - RNA, 20 nt, synthetic construct
  source 1..20: mol_type = other RNA
aacactttattcactgttgg

SEQ ID NO: 5970 - RNA, 20 nt, synthetic construct
  source 1..20: mol_type = other RNA
acactttattcactgttggt

SEQ ID NO: 5971 - RNA, 20 nt, synthetic construct
  source 1..20: mol_type = other RNA
ctgttggtgggtatgtaaac

SEQ ID NO: 5972 - RNA, 20 nt, synthetic construct
  source 1..20: mol_type = other RNA
ctctgtgctgattttcatag

SEQ ID NO: 5973 - RNA, 20 nt, synthetic construct
  source 1..20: mol_type = other RNA
cactatgaaaatcagcacag

SEQ ID NO: 5974 - RNA, 20 nt, synthetic construct
  source 1..20: mol_type = other RNA
ttgttttgttggagtgggaa

SEQ ID NO: 5975 - RNA, 20 nt, synthetic construct
  source 1..20: mol_type = other RNA
tttgttttgttggagtggga

SEQ ID NO: 5976 - RNA, 20 nt, synthetic construct
  source 1..20: mol_type = other RNA
ttgttttgttttgttggagt

SEQ ID NO: 5977 - RNA, 20 nt, synthetic construct
  source 1..20: mol_type = other RNA
tttgttttgttttgttggag

SEQ ID NO: 5978 - RNA, 20 nt, synthetic construct
  source 1..20: mol_type = other RNA
tttgttttgttttgttttgt

SEQ ID NO: 5979 - RNA, 20 nt, synthetic construct
  source 1..20: mol_type = other RNA
gttctagttctagttctaga

SEQ ID NO: 5980 - RNA, 20 nt, synthetic construct
  source 1..20: mol_type = other RNA
agttctagttctagttctag

SEQ ID NO: 5981 - RNA, 20 nt, synthetic construct
  source 1..20: mol_type = other RNA
ctagaactactgcacgatcc

SEQ ID NO: 5982 - RNA, 20 nt, synthetic construct
  source 1..20: mol_type = other RNA
gatccaggtttaccactcct

SEQ ID NO: 5983 - RNA, 20 nt, synthetic construct
  source 1..20: mol_type = other RNA
atacctaggagtggtaaacc

SEQ ID NO: 5984 - RNA, 20 nt, synthetic construct
  source 1..20: mol_type = other RNA
tttgagtaaatacctaggag

SEQ ID NO: 5985 - RNA, 20 nt, synthetic construct
  source 1..20: mol_type = other RNA
actcctaggtatttactcaa

SEQ ID NO: 5986 - RNA, 20 nt, synthetic construct
  source 1..20: mol_type = other RNA
agtcctttgagtaaatacct

SEQ ID NO: 5987 - RNA, 20 nt, synthetic construct
  source 1..20: mol_type = other RNA
tatacgtcaacctgtgacag

SEQ ID NO: 5988 - RNA, 20 nt, synthetic construct
  source 1..20: mol_type = other RNA
gtatatgatgcctctgtcac

SEQ ID NO: 5989 - RNA, 20 nt, synthetic construct
  source 1..20: mol_type = other RNA
cagaggcatcatatacaagc

SEQ ID NO: 5990 - RNA, 20 nt, synthetic construct
  source 1..20: mol_type = other RNA
agaggcatcatatacaagca

SEQ ID NO: 5991 - RNA, 20 nt, synthetic construct
  source 1..20: mol_type = other RNA
catcatatacaagcagggag

SEQ ID NO: 5992 - RNA, 20 nt, synthetic construct
  source 1..20: mol_type = other RNA
catatacaagcagggagtgg

SEQ ID NO: 5993 - RNA, 20 nt, synthetic construct
  source 1..20: mol_type = other RNA
tgaggggtgggattaaaggc

SEQ ID NO: 5994 - RNA, 20 nt, synthetic construct
  source 1..20: mol_type = other RNA
tgcctttaatcccacccctc

SEQ ID NO: 5995 - RNA, 20 nt, synthetic construct
  source 1..20: mol_type = other RNA
ctcctgaggggtgggattaa

SEQ ID NO: 5996 - RNA, 20 nt, synthetic construct
  source 1..20: mol_type = other RNA
ctttaatcccacccctcagg

SEQ ID NO: 5997 - RNA, 20 nt, synthetic construct
  source 1..20: mol_type = other RNA
gactctgcctcctgaggggt

SEQ ID NO: 5998 - RNA, 20 nt, synthetic construct
  source 1..20: mol_type = other RNA
tgactctgcctcctgagggg

SEQ ID NO: 5999 - RNA, 20 nt, synthetic construct
  source 1..20: mol_type = other RNA
acccctcaggaggcagagtc

SEQ ID NO: 6000 - RNA, 20 nt, synthetic construct
  source 1..20: mol_type = other RNA
acctgactctgcctcctgag

SEQ ID NO: 6001 - RNA, 20 nt, synthetic construct
  source 1..20: mol_type = other RNA
tacctgactctgcctcctga

SEQ ID NO: 6002 - RNA, 20 nt, synthetic construct
  source 1..20: mol_type = other RNA
ctacctgactctgcctcctg

SEQ ID NO: 6003 - RNA, 20 nt, synthetic construct
  source 1..20: mol_type = other RNA
ggtagatctctgtgagttcg

SEQ ID NO: 6004 - RNA, 20 nt, synthetic construct
  source 1..20: mol_type = other RNA
ctgtgagttcgaggccagtt

SEQ ID NO: 6005 - RNA, 20 nt, synthetic construct
  source 1..20: mol_type = other RNA
actcactatgtagaccaaac

SEQ ID NO: 6006 - RNA, 20 nt, synthetic construct
  source 1..20: mol_type = other RNA
catatggctatatggtctta

SEQ ID NO: 6007 - RNA, 20 nt, synthetic construct
  source 1..20: mol_type = other RNA
cataagaccatatagccata

SEQ ID NO: 6008 - RNA, 20 nt, synthetic construct
  source 1..20: mol_type = other RNA
aagaccatatagccatatgg

SEQ ID NO: 6009 - RNA, 20 nt, synthetic construct
  source 1..20: mol_type = other RNA
agaccatatagccatatgga

SEQ ID NO: 6010 - RNA, 20 nt, synthetic construct
  source 1..20: mol_type = other RNA
gaccatatagccatatggag

SEQ ID NO: 6011 - RNA, 20 nt, synthetic construct
  source 1..20: mol_type = other RNA
accatatagccatatggagg

SEQ ID NO: 6012 - RNA, 20 nt, synthetic construct
  source 1..20: mol_type = other RNA
ccatatagccatatggaggg

SEQ ID NO: 6013 - RNA, 20 nt, synthetic construct
  source 1..20: mol_type = other RNA
cccccctccatatggctata

SEQ ID NO: 6014 - RNA, 20 nt, synthetic construct
  source 1..20: mol_type = other RNA
ctcacaatcccccctccata

SEQ ID NO: 6015 - RNA, 20 nt, synthetic construct
  source 1..20: mol_type = other RNA
gagagaattattaaatgaat

SEQ ID NO: 6016 - RNA, 20 nt, synthetic construct
  source 1..20: mol_type = other RNA
tatacactgtcttctttcat

SEQ ID NO: 6017 - RNA, 20 nt, synthetic construct
  source 1..20: mol_type = other RNA
cataggaaaaatgaacagaa

SEQ ID NO: 6018 - RNA, 20 nt, synthetic construct
  source 1..20: mol_type = other RNA
ataggaaaaatgaacagaaa

SEQ ID NO: 6019 - RNA, 20 nt, synthetic construct
  source 1..20: mol_type = other RNA
aacagaaagggagagatctt

SEQ ID NO: 6020 - RNA, 20 nt, synthetic construct
  source 1..20: mol_type = other RNA
acagaaagggagagatcttt

SEQ ID NO: 6021 - RNA, 20 nt, synthetic construct
  source 1..20: mol_type = other RNA
gaaagggagagatctttggg

SEQ ID NO: 6022 - RNA, 20 nt, synthetic construct
  source 1..20: mol_type = other RNA
aaagggagagatctttgggt

SEQ ID NO: 6023 - RNA, 20 nt, synthetic construct
  source 1..20: mol_type = other RNA
aagggagagatctttgggtg

SEQ ID NO: 6024 - RNA, 20 nt, synthetic construct
  source 1..20: mol_type = other RNA
atacatgacatgaaagcaga

SEQ ID NO: 6025 - RNA, 20 nt, synthetic construct
  source 1..20: mol_type = other RNA
tacatgacatgaaagcagaa

SEQ ID NO: 6026 - RNA, 20 nt, synthetic construct
  source 1..20: mol_type = other RNA
acatgacatgaaagcagaag

SEQ ID NO: 6027 - RNA, 20 nt, synthetic construct
  source 1..20: mol_type = other RNA
agcagaaggggattagttat

SEQ ID NO: 6028 - RNA, 20 nt, synthetic construct
  source 1..20: mol_type = other RNA
gaaggggattagttattgga

SEQ ID NO: 6029 - RNA, 20 nt, synthetic construct
  source 1..20: mol_type = other RNA
gggattagttattggaaggc

SEQ ID NO: 6030 - RNA, 20 nt, synthetic construct
  source 1..20: mol_type = other RNA
ggattagttattggaaggca

SEQ ID NO: 6031 - RNA, 20 nt, synthetic construct
  source 1..20: mol_type = other RNA
ttagttattggaaggcaggg

SEQ ID NO: 6032 - RNA, 20 nt, synthetic construct
  source 1..20: mol_type = other RNA
tagttattggaaggcaggga

SEQ ID NO: 6033 - RNA, 20 nt, synthetic construct
  source 1..20: mol_type = other RNA
tggaaggcagggagggaccc

SEQ ID NO: 6034 - RNA, 20 nt, synthetic construct
  source 1..20: mol_type = other RNA
aaggcagggagggacccagg

SEQ ID NO: 6035 - RNA, 20 nt, synthetic construct
  source 1..20: mol_type = other RNA
ggagggacccaggaggatga

SEQ ID NO: 6036 - RNA, 20 nt, synthetic construct
  source 1..20: mol_type = other RNA
gagggacccaggaggatgaa

SEQ ID NO: 6037 - RNA, 20 nt, synthetic construct
  source 1..20: mol_type = other RNA
tctcttcccttcatcctcct

SEQ ID NO: 6038 - RNA, 20 nt, synthetic construct
  source 1..20: mol_type = other RNA
ttctcttcccttcatcctcc

SEQ ID NO: 6039 - RNA, 20 nt, synthetic construct
  source 1..20: mol_type = other RNA
gatgaagggaagagaatgca

SEQ ID NO: 6040 - RNA, 20 nt, synthetic construct
  source 1..20: mol_type = other RNA
atgaagggaagagaatgcaa

SEQ ID NO: 6041 - RNA, 20 nt, synthetic construct
  source 1..20: mol_type = other RNA
gggaagagaatgcaagggaa

SEQ ID NO: 6042 - RNA, 20 nt, synthetic construct
  source 1..20: mol_type = other RNA
aatgcaagggaaaggagtaa

SEQ ID NO: 6043 - RNA, 20 nt, synthetic construct
  source 1..20: mol_type = other RNA
gcaagggaaaggagtaaagg

SEQ ID NO: 6044 - RNA, 20 nt, synthetic construct
  source 1..20: mol_type = other RNA
agggaaaggagtaaaggagg

SEQ ID NO: 6045 - RNA, 20 nt, synthetic construct
  source 1..20: mol_type = other RNA
gaaaggagtaaaggaggagg

SEQ ID NO: 6046 - RNA, 20 nt, synthetic construct
  source 1..20: mol_type = other RNA
agtaaaggaggaggaggtag

SEQ ID NO: 6047 - RNA, 20 nt, synthetic construct
  source 1..20: mol_type = other RNA
tattaattccagcacttgtg

SEQ ID NO: 6048 - RNA, 20 nt, synthetic construct
  source 1..20: mol_type = other RNA
taattccagcacttgtgagg

SEQ ID NO: 6049 - RNA, 20 nt, synthetic construct
  source 1..20: mol_type = other RNA
aattccagcacttgtgagga

SEQ ID NO: 6050 - RNA, 20 nt, synthetic construct
  source 1..20: mol_type = other RNA
attccagcacttgtgaggag

SEQ ID NO: 6051 - RNA, 20 nt, synthetic construct
  source 1..20: mol_type = other RNA
tgtcccctcctcacaagtgc

SEQ ID NO: 6052 - RNA, 20 nt, synthetic construct
  source 1..20: mol_type = other RNA
gacagagctctgtgagttca

SEQ ID NO: 6053 - RNA, 20 nt, synthetic construct
  source 1..20: mol_type = other RNA
tggaactgactatgcagagg

SEQ ID NO: 6054 - RNA, 20 nt, synthetic construct
  source 1..20: mol_type = other RNA
ctggaactgactatgcagag

SEQ ID NO: 6055 - RNA, 20 nt, synthetic construct
  source 1..20: mol_type = other RNA
ccctctgcatagtcagttcc

SEQ ID NO: 6056 - RNA, 20 nt, synthetic construct
  source 1..20: mol_type = other RNA
cctggaactgactatgcaga

SEQ ID NO: 6057 - RNA, 20 nt, synthetic construct
  source 1..20: mol_type = other RNA
tcctggaactgactatgcag

SEQ ID NO: 6058 - RNA, 20 nt, synthetic construct
  source 1..20: mol_type = other RNA
gtcagttccaggatagccaa

SEQ ID NO: 6059 - RNA, 20 nt, synthetic construct
  source 1..20: mol_type = other RNA
tatgtagccattggctatcc

SEQ ID NO: 6060 - RNA, 20 nt, synthetic construct
  source 1..20: mol_type = other RNA
gggtctcattatgtagccat

SEQ ID NO: 6061 - RNA, 20 nt, synthetic construct
  source 1..20: mol_type = other RNA
atgagaccctgtgtcagaga

SEQ ID NO: 6062 - RNA, 20 nt, synthetic construct
  source 1..20: mol_type = other RNA
agaccctgtgtcagagaagg

SEQ ID NO: 6063 - RNA, 20 nt, synthetic construct
  source 1..20: mol_type = other RNA
cggccaccttctctgacaca

SEQ ID NO: 6064 - RNA, 20 nt, synthetic construct
  source 1..20: mol_type = other RNA
cctgtgtcagagaaggtggc

SEQ ID NO: 6065 - RNA, 20 nt, synthetic construct
  source 1..20: mol_type = other RNA
ccggccaccttctctgacac

SEQ ID NO: 6066 - RNA, 20 nt, synthetic construct
  source 1..20: mol_type = other RNA
gtcagagaaggtggccggcg

SEQ ID NO: 6067 - RNA, 20 nt, synthetic construct
  source 1..20: mol_type = other RNA
tcagagaaggtggccggcga

SEQ ID NO: 6068 - RNA, 20 nt, synthetic construct
  source 1..20: mol_type = other RNA
taagcatcaatatccctcgc

SEQ ID NO: 6069 - RNA, 20 nt, synthetic construct
  source 1..20: mol_type = other RNA
taactcattcagctgtgtgg

SEQ ID NO: 6070 - RNA, 20 nt, synthetic construct
  source 1..20: mol_type = other RNA
gtttaactcattcagctgtg

SEQ ID NO: 6071 - RNA, 20 nt, synthetic construct
  source 1..20: mol_type = other RNA
agtgcaaaagtagcaggaac

SEQ ID NO: 6072 - RNA, 20 nt, synthetic construct
  source 1..20: mol_type = other RNA
attgaaagtgcaaaagtagc

SEQ ID NO: 6073 - RNA, 20 nt, synthetic construct
  source 1..20: mol_type = other RNA
atgctcccagattacttaca

SEQ ID NO: 6074 - RNA, 20 nt, synthetic construct
  source 1..20: mol_type = other RNA
aaattccatgtaagtaatct

SEQ ID NO: 6075 - RNA, 20 nt, synthetic construct
  source 1..20: mol_type = other RNA
taaattccatgtaagtaatc

SEQ ID NO: 6076 - RNA, 20 nt, synthetic construct
  source 1..20: mol_type = other RNA
atggaatttatattttattg

SEQ ID NO: 6077 - RNA, 20 nt, synthetic construct
  source 1..20: mol_type = other RNA
gaggtttgtctatgatgtac

SEQ ID NO: 6078 - RNA, 20 nt, synthetic construct
  source 1..20: mol_type = other RNA
ttggttgaaaatttttcttg

SEQ ID NO: 6079 - RNA, 20 nt, synthetic construct
  source 1..20: mol_type = other RNA
aaattttcaaccaatagtcc

SEQ ID NO: 6080 - RNA, 20 nt, synthetic construct
  source 1..20: mol_type = other RNA
gttatttttgcctggactat

SEQ ID NO: 6081 - RNA, 20 nt, synthetic construct
  source 1..20: mol_type = other RNA
aaaaagaggttatttttgcc

SEQ ID NO: 6082 - RNA, 20 nt, synthetic construct
  source 1..20: mol_type = other RNA
agaaagaaagaaagaaaaag

SEQ ID NO: 6083 - RNA, 20 nt, synthetic construct
  source 1..20: mol_type = other RNA
tctttttttttttttttttt

SEQ ID NO: 6084 - RNA, 20 nt, synthetic construct
  source 1..20: mol_type = other RNA
tttttttggttttttgaaac

SEQ ID NO: 6085 - RNA, 20 nt, synthetic construct
  source 1..20: mol_type = other RNA
ttttttggttttttgaaaca

SEQ ID NO: 6086 - RNA, 20 nt, synthetic construct
  source 1..20: mol_type = other RNA
agggtttctctgtatagccc

SEQ ID NO: 6087 - RNA, 20 nt, synthetic construct
  source 1..20: mol_type = other RNA
ctgtatagccctggctgtcc

SEQ ID NO: 6088 - RNA, 20 nt, synthetic construct
  source 1..20: mol_type = other RNA
agtgagttccaggacagcca

SEQ ID NO: 6089 - RNA, 20 nt, synthetic construct
  source 1..20: mol_type = other RNA
aagtgagttccaggacagcc

SEQ ID NO: 6090 - RNA, 20 nt, synthetic construct
  source 1..20: mol_type = other RNA
tggtgtacaaagtgagttcc

SEQ ID NO: 6091 - RNA, 20 nt, synthetic construct
  source 1..20: mol_type = other RNA
tggaactcactttgtacacc

SEQ ID NO: 6092 - RNA, 20 nt, synthetic construct
  source 1..20: mol_type = other RNA
actcactttgtacaccaggc

SEQ ID NO: 6093 - RNA, 20 nt, synthetic construct
  source 1..20: mol_type = other RNA
ttctgagttcgaggccagcc

SEQ ID NO: 6094 - RNA, 20 nt, synthetic construct
  source 1..20: mol_type = other RNA
caggtggatttctgagttcg

SEQ ID NO: 6095 - RNA, 20 nt, synthetic construct
  source 1..20: mol_type = other RNA
actcgggaggcagaggcagg

SEQ ID NO: 6096 - RNA, 20 nt, synthetic construct
  source 1..20: mol_type = other RNA
agcactcgggaggcagaggc

SEQ ID NO: 6097 - RNA, 20 nt, synthetic construct
  source 1..20: mol_type = other RNA
gcctctgcctcccgagtgct

SEQ ID NO: 6098 - RNA, 20 nt, synthetic construct
  source 1..20: mol_type = other RNA
tccgagcactcgggaggcag

SEQ ID NO: 6099 - RNA, 20 nt, synthetic construct
  source 1..20: mol_type = other RNA
ctttaatccgagcactcggg

SEQ ID NO: 6100 - RNA, 20 nt, synthetic construct
  source 1..20: mol_type = other RNA
ctcccgagtgctcggattaa

SEQ ID NO: 6101 - RNA, 20 nt, synthetic construct
  source 1..20: mol_type = other RNA
cgcctttaatccgagcactc

SEQ ID NO: 6102 - RNA, 20 nt, synthetic construct
  source 1..20: mol_type = other RNA
acgcctttaatccgagcact

SEQ ID NO: 6103 - RNA, 20 nt, synthetic construct
  source 1..20: mol_type = other RNA
tattttttgcgggacggtgg

SEQ ID NO: 6104 - RNA, 20 nt, synthetic construct
  source 1..20: mol_type = other RNA
ggttattttttgcgggacgg

SEQ ID NO: 6105 - RNA, 20 nt, synthetic construct
  source 1..20: mol_type = other RNA
acaggttattttttgcggga

SEQ ID NO: 6106 - RNA, 20 nt, synthetic construct
  source 1..20: mol_type = other RNA
aaaaacaggttattttttgc

SEQ ID NO: 6107 - RNA, 20 nt, synthetic construct
  source 1..20: mol_type = other RNA
caaaaacaggttattttttg

SEQ ID NO: 6108 - RNA, 20 nt, synthetic construct
  source 1..20: mol_type = other RNA
ataattaaaacaacaaaaac

SEQ ID NO: 6109 - RNA, 20 nt, synthetic construct
  source 1..20: mol_type = other RNA
tttttaagattttatgtgta

SEQ ID NO: 6110 - RNA, 20 nt, synthetic construct
  source 1..20: mol_type = other RNA
ttttaagattttatgtgtat

SEQ ID NO: 6111 - RNA, 20 nt, synthetic construct
  source 1..20: mol_type = other RNA
ctgtgtaccacttgtatgct

SEQ ID NO: 6112 - RNA, 20 nt, synthetic construct
  source 1..20: mol_type = other RNA
ttgggcaccaagcatacaag

SEQ ID NO: 6113 - RNA, 20 nt, synthetic construct
  source 1..20: mol_type = other RNA
tgtatgcttggtgcccaaga

SEQ ID NO: 6114 - RNA, 20 nt, synthetic construct
  source 1..20: mol_type = other RNA
tgatctgttctgtccttctt

SEQ ID NO: 6115 - RNA, 20 nt, synthetic construct
  source 1..20: mol_type = other RNA
atgatctgttctgtccttct

SEQ ID NO: 6116 - RNA, 20 nt, synthetic construct
  source 1..20: mol_type = other RNA
agaaggacagaacagatcat

SEQ ID NO: 6117 - RNA, 20 nt, synthetic construct
  source 1..20: mol_type = other RNA
gaaggacagaacagatcata

SEQ ID NO: 6118 - RNA, 20 nt, synthetic construct
  source 1..20: mol_type = other RNA
gaacagatcatagggtttcc

SEQ ID NO: 6119 - RNA, 20 nt, synthetic construct
  source 1..20: mol_type = other RNA
aacagatcatagggtttcct

SEQ ID NO: 6120 - RNA, 20 nt, synthetic construct
  source 1..20: mol_type = other RNA
tttcctgggataagagttat

SEQ ID NO: 6121 - RNA, 20 nt, synthetic construct
  source 1..20: mol_type = other RNA
actcctataactcttatccc

SEQ ID NO: 6122 - RNA, 20 nt, synthetic construct
  source 1..20: mol_type = other RNA
gatgactgtaagccaccaag

SEQ ID NO: 6123 - RNA, 20 nt, synthetic construct
  source 1..20: mol_type = other RNA
gtaagccaccaagtggacgc

SEQ ID NO: 6124 - RNA, 20 nt, synthetic construct
  source 1..20: mol_type = other RNA
taagccaccaagtggacgct

SEQ ID NO: 6125 - RNA, 20 nt, synthetic construct
  source 1..20: mol_type = other RNA
aattcccagcgtccacttgg

SEQ ID NO: 6126 - RNA, 20 nt, synthetic construct
  source 1..20: mol_type = other RNA
ttcaattcccagcgtccact

SEQ ID NO: 6127 - RNA, 20 nt, synthetic construct
  source 1..20: mol_type = other RNA
ggacgctgggaattgaacct

SEQ ID NO: 6128 - RNA, 20 nt, synthetic construct
  source 1..20: mol_type = other RNA
ggaattgaaccttggttagc

SEQ ID NO: 6129 - RNA, 20 nt, synthetic construct
  source 1..20: mol_type = other RNA
gacactcttccagctaacca

SEQ ID NO: 6130 - RNA, 20 nt, synthetic construct
  source 1..20: mol_type = other RNA
gggactggaattaaaaatac

SEQ ID NO: 6131 - RNA, 20 nt, synthetic construct
  source 1..20: mol_type = other RNA
catagacaaacaacggggac

SEQ ID NO: 6132 - RNA, 20 nt, synthetic construct
  source 1..20: mol_type = other RNA
atcttcatagacaaacaacg

SEQ ID NO: 6133 - RNA, 20 nt, synthetic construct
  source 1..20: mol_type = other RNA
aatcttcatagacaaacaac

SEQ ID NO: 6134 - RNA, 20 nt, synthetic construct
  source 1..20: mol_type = other RNA
aaatcttcatagacaaacaa

SEQ ID NO: 6135 - RNA, 20 nt, synthetic construct
  source 1..20: mol_type = other RNA
ttgtctatgaagattttgct

SEQ ID NO: 6136 - RNA, 20 nt, synthetic construct
  source 1..20: mol_type = other RNA
ttttgcttggtagtccagtc

SEQ ID NO: 6137 - RNA, 20 nt, synthetic construct
  source 1..20: mol_type = other RNA
ccagtctggctttaagaaac

SEQ ID NO: 6138 - RNA, 20 nt, synthetic construct
  source 1..20: mol_type = other RNA
cctgtttcttaaagccagac

SEQ ID NO: 6139 - RNA, 20 nt, synthetic construct
  source 1..20: mol_type = other RNA
cagtctggctttaagaaaca

SEQ ID NO: 6140 - RNA, 20 nt, synthetic construct
  source 1..20: mol_type = other RNA
aacagggtctcatgcatccc

SEQ ID NO: 6141 - RNA, 20 nt, synthetic construct
  source 1..20: mol_type = other RNA
atggaagtctgagcaagcca

SEQ ID NO: 6142 - RNA, 20 nt, synthetic construct
  source 1..20: mol_type = other RNA
catggaagtctgagcaagcc

SEQ ID NO: 6143 - RNA, 20 nt, synthetic construct
  source 1..20: mol_type = other RNA
ctcagacttccatgcagctg

SEQ ID NO: 6144 - RNA, 20 nt, synthetic construct
  source 1..20: mol_type = other RNA
gacttccatgcagctgagga

SEQ ID NO: 6145 - RNA, 20 nt, synthetic construct
  source 1..20: mol_type = other RNA
taaagccatcctcagctgca

SEQ ID NO: 6146 - RNA, 20 nt, synthetic construct
  source 1..20: mol_type = other RNA
tctacgaggaaaaggcagga

SEQ ID NO: 6147 - RNA, 20 nt, synthetic construct
  source 1..20: mol_type = other RNA
ctctacgaggaaaaggcagg

SEQ ID NO: 6148 - RNA, 20 nt, synthetic construct
  source 1..20: mol_type = other RNA
gcactctacgaggaaaaggc

SEQ ID NO: 6149 - RNA, 20 nt, synthetic construct
  source 1..20: mol_type = other RNA
ctcagcactctacgaggaaa

SEQ ID NO: 6150 - RNA, 20 nt, synthetic construct
  source 1..20: mol_type = other RNA
tgtaatctcagcactctacg

SEQ ID NO: 6151 - RNA, 20 nt, synthetic construct
  source 1..20: mol_type = other RNA
gagaagtctgctggtggcac

SEQ ID NO: 6152 - RNA, 20 nt, synthetic construct
  source 1..20: mol_type = other RNA
tgttaggagaagtctgctgg

SEQ ID NO: 6153 - RNA, 20 nt, synthetic construct
  source 1..20: mol_type = other RNA
tcttgttaggagaagtctgc

SEQ ID NO: 6154 - RNA, 20 nt, synthetic construct
  source 1..20: mol_type = other RNA
gacttctcctaacaagaatg

SEQ ID NO: 6155 - RNA, 20 nt, synthetic construct
  source 1..20: mol_type = other RNA
tcctaacaagaatgtggcac

SEQ ID NO: 6156 - RNA, 20 nt, synthetic construct
  source 1..20: mol_type = other RNA
cctaacaagaatgtggcaca

SEQ ID NO: 6157 - RNA, 20 nt, synthetic construct
  source 1..20: mol_type = other RNA
ccctgtgccacattcttgtt

SEQ ID NO: 6158 - RNA, 20 nt, synthetic construct
  source 1..20: mol_type = other RNA
aacaagaatgtggcacaggg

SEQ ID NO: 6159 - RNA, 20 nt, synthetic construct
  source 1..20: mol_type = other RNA
atgtggcacagggaggcaac

SEQ ID NO: 6160 - RNA, 20 nt, synthetic construct
  source 1..20: mol_type = other RNA
tgtggcacagggaggcaact

SEQ ID NO: 6161 - RNA, 20 nt, synthetic construct
  source 1..20: mol_type = other RNA
gaggcaactgggaatcaaac

SEQ ID NO: 6162 - RNA, 20 nt, synthetic construct
  source 1..20: mol_type = other RNA
caactgggaatcaaacagga

SEQ ID NO: 6163 - RNA, 20 nt, synthetic construct
  source 1..20: mol_type = other RNA
ctgggaatcaaacaggaagg

SEQ ID NO: 6164 - RNA, 20 nt, synthetic construct
  source 1..20: mol_type = other RNA
aaacaggaaggaggagtaaa

SEQ ID NO: 6165 - RNA, 20 nt, synthetic construct
  source 1..20: mol_type = other RNA
aggaaggaggagtaaaagga

SEQ ID NO: 6166 - RNA, 20 nt, synthetic construct
  source 1..20: mol_type = other RNA
ggaaggaggagtaaaaggaa

SEQ ID NO: 6167 - RNA, 20 nt, synthetic construct
  source 1..20: mol_type = other RNA
gaaggaggagtaaaaggaag

SEQ ID NO: 6168 - RNA, 20 nt, synthetic construct
  source 1..20: mol_type = other RNA
ggaggagtaaaaggaagggg

SEQ ID NO: 6169 - RNA, 20 nt, synthetic construct
  source 1..20: mol_type = other RNA
gagtaaaaggaaggggagga

SEQ ID NO: 6170 - RNA, 20 nt, synthetic construct
  source 1..20: mol_type = other RNA
aaaggaaggggaggaaggag

SEQ ID NO: 6171 - RNA, 20 nt, synthetic construct
  source 1..20: mol_type = other RNA
gggaggaaggagaggagaag

SEQ ID NO: 6172 - RNA, 20 nt, synthetic construct
  source 1..20: mol_type = other RNA
ggaaggagaggagaagtggc

SEQ ID NO: 6173 - RNA, 20 nt, synthetic construct
  source 1..20: mol_type = other RNA
aggagaggagaagtggcagg

SEQ ID NO: 6174 - RNA, 20 nt, synthetic construct
  source 1..20: mol_type = other RNA
gtggcaggaggagaagaaaa

SEQ ID NO: 6175 - RNA, 20 nt, synthetic construct
  source 1..20: mol_type = other RNA
gcaggaggagaagaaaaagg

SEQ ID NO: 6176 - RNA, 20 nt, synthetic construct
  source 1..20: mol_type = other RNA
ggaggagaagaaaaaggagg

SEQ ID NO: 6177 - RNA, 20 nt, synthetic construct
  source 1..20: mol_type = other RNA
agaaaaaggaggcggagaaa

SEQ ID NO: 6178 - RNA, 20 nt, synthetic construct
  source 1..20: mol_type = other RNA
aaaaggaggcggagaaaagg

SEQ ID NO: 6179 - RNA, 20 nt, synthetic construct
  source 1..20: mol_type = other RNA
aggcggagaaaaggtggtag

SEQ ID NO: 6180 - RNA, 20 nt, synthetic construct
  source 1..20: mol_type = other RNA
cggagaaaaggtggtagtgg

SEQ ID NO: 6181 - RNA, 20 nt, synthetic construct
  source 1..20: mol_type = other RNA
agaaaaggtggtagtggtgg

SEQ ID NO: 6182 - RNA, 20 nt, synthetic construct
  source 1..20: mol_type = other RNA
ggtggtagtggtggaggaag

SEQ ID NO: 6183 - RNA, 20 nt, synthetic construct
  source 1..20: mol_type = other RNA
ggtagtggtggaggaagagg

SEQ ID NO: 6184 - RNA, 20 nt, synthetic construct
  source 1..20: mol_type = other RNA
agtggtggaggaagaggagg

SEQ ID NO: 6185 - RNA, 20 nt, synthetic construct
  source 1..20: mol_type = other RNA
ggtggaggaagaggaggagg

SEQ ID NO: 6186 - RNA, 20 nt, synthetic construct
  source 1..20: mol_type = other RNA
ggaggaagaggaggaggagg

SEQ ID NO: 6187 - RNA, 20 nt, synthetic construct
  source 1..20: mol_type = other RNA
ggaagaggaggaggaggagg

SEQ ID NO: 6188 - RNA, 20 nt, synthetic construct
  source 1..20: mol_type = other RNA
agaggaggaggaggaggagg

SEQ ID NO: 6189 - RNA, 20 nt, synthetic construct
  source 1..20: mol_type = other RNA
ggaggaggaggaggaggagg

SEQ ID NO: 6190 - RNA, 20 nt, synthetic construct
  source 1..20: mol_type = other RNA
ggaggaggaggaggaggagg

SEQ ID NO: 6191 - RNA, 20 nt, synthetic construct
  source 1..20: mol_type = other RNA
gaggaggaggaggaggagga

SEQ ID NO: 6192 - RNA, 20 nt, synthetic construct
  source 1..20: mol_type = other RNA
aggaggaggaggaggaggag

SEQ ID NO: 6193 - RNA, 20 nt, synthetic construct
  source 1..20: mol_type = other RNA
ggaggaggaggaggaggagg

SEQ ID NO: 6194 - RNA, 20 nt, synthetic construct
  source 1..20: mol_type = other RNA
gagggggacttaatcagtaa

SEQ ID NO: 6195 - RNA, 20 nt, synthetic construct
  source 1..20: mol_type = other RNA
acttaatcagtaaaggaaaa

SEQ ID NO: 6196 - RNA, 20 nt, synthetic construct
  source 1..20: mol_type = other RNA
aaaaggctgagctcagtcct

SEQ ID NO: 6197 - RNA, 20 nt, synthetic construct
  source 1..20: mol_type = other RNA
ctcagtccttggaacctaca

SEQ ID NO: 6198 - RNA, 20 nt, synthetic construct
  source 1..20: mol_type = other RNA
gtccttggaacctacatggt

SEQ ID NO: 6199 - RNA, 20 nt, synthetic construct
  source 1..20: mol_type = other RNA
ctcctaccatgtaggttcca

SEQ ID NO: 6200 - RNA, 20 nt, synthetic construct
  source 1..20: mol_type = other RNA
ctcattctctcctaccatgt

SEQ ID NO: 6201 - RNA, 20 nt, synthetic construct
  source 1..20: mol_type = other RNA
gtttcctctgatccccacac

SEQ ID NO: 6202 - RNA, 20 nt, synthetic construct
  source 1..20: mol_type = other RNA
tgctccagtgtggggatcag

SEQ ID NO: 6203 - RNA, 20 nt, synthetic construct
  source 1..20: mol_type = other RNA
tgatccccacactggagcaa

SEQ ID NO: 6204 - RNA, 20 nt, synthetic construct
  source 1..20: mol_type = other RNA
ggcaccattgctccagtgtg

SEQ ID NO: 6205 - RNA, 20 nt, synthetic construct
  source 1..20: mol_type = other RNA
tggcaccattgctccagtgt

SEQ ID NO: 6206 - RNA, 20 nt, synthetic construct
  source 1..20: mol_type = other RNA
atggcaccattgctccagtg

SEQ ID NO: 6207 - RNA, 20 nt, synthetic construct
  source 1..20: mol_type = other RNA
gaagtgggagagtgatgtga

SEQ ID NO: 6208 - RNA, 20 nt, synthetic construct
  source 1..20: mol_type = other RNA
tgtgaggagttgggtgaagt

SEQ ID NO: 6209 - RNA, 20 nt, synthetic construct
  source 1..20: mol_type = other RNA
ttgtgaggagttgggtgaag

SEQ ID NO: 6210 - RNA, 20 nt, synthetic construct
  source 1..20: mol_type = other RNA
ttttatttttgtgaggagtt

SEQ ID NO: 6211 - RNA, 20 nt, synthetic construct
  source 1..20: mol_type = other RNA
tttttatttttgtgaggagt

SEQ ID NO: 6212 - RNA, 20 nt, synthetic construct
  source 1..20: mol_type = other RNA
ttttgttttttatttttgtg

SEQ ID NO: 6213 - RNA, 20 nt, synthetic construct
  source 1..20: mol_type = other RNA
ttaaaaaagaaagctgtagc

SEQ ID NO: 6214 - RNA, 20 nt, synthetic construct
  source 1..20: mol_type = other RNA
taaaaaagaaagctgtagcc

SEQ ID NO: 6215 - RNA, 20 nt, synthetic construct
  source 1..20: mol_type = other RNA
aagaaagctgtagccgggcg

SEQ ID NO: 6216 - RNA, 20 nt, synthetic construct
  source 1..20: mol_type = other RNA
aaagctgtagccgggcgtgg

SEQ ID NO: 6217 - RNA, 20 nt, synthetic construct
  source 1..20: mol_type = other RNA
aaagtgtgtgccaccacgcc

SEQ ID NO: 6218 - RNA, 20 nt, synthetic construct
  source 1..20: mol_type = other RNA
gtggcacacacttttaatcc

SEQ ID NO: 6219 - RNA, 20 nt, synthetic construct
  source 1..20: mol_type = other RNA
acacttttaatcccggcact

SEQ ID NO: 6220 - RNA, 20 nt, synthetic construct
  source 1..20: mol_type = other RNA
cacttttaatcccggcactt

SEQ ID NO: 6221 - RNA, 20 nt, synthetic construct
  source 1..20: mol_type = other RNA
ttttaatcccggcacttggg

SEQ ID NO: 6222 - RNA, 20 nt, synthetic construct
  source 1..20: mol_type = other RNA
tcccggcacttgggaggcag

SEQ ID NO: 6223 - RNA, 20 nt, synthetic construct
  source 1..20: mol_type = other RNA
gcctctgcctcccaagtgcc

SEQ ID NO: 6224 - RNA, 20 nt, synthetic construct
  source 1..20: mol_type = other RNA
tgcctctgcctcccaagtgc

SEQ ID NO: 6225 - RNA, 20 nt, synthetic construct
  source 1..20: mol_type = other RNA
acttgggaggcagaggcaag

SEQ ID NO: 6226 - RNA, 20 nt, synthetic construct
  source 1..20: mol_type = other RNA
caagcggatttctgagttcg

SEQ ID NO: 6227 - RNA, 20 nt, synthetic construct
  source 1..20: mol_type = other RNA
ttctgagttcgaggccagct

SEQ ID NO: 6228 - RNA, 20 nt, synthetic construct
  source 1..20: mol_type = other RNA
actcactttgtagaccaagc

SEQ ID NO: 6229 - RNA, 20 nt, synthetic construct
  source 1..20: mol_type = other RNA
tggtctacaaagtgagttcc

SEQ ID NO: 6230 - RNA, 20 nt, synthetic construct
  source 1..20: mol_type = other RNA
aagtgagttccaggacagcc

SEQ ID NO: 6231 - RNA, 20 nt, synthetic construct
  source 1..20: mol_type = other RNA
agtgagttccaggacagcca

SEQ ID NO: 6232 - RNA, 20 nt, synthetic construct
  source 1..20: mol_type = other RNA
ctgtgtagccctggctgtcc

SEQ ID NO: 6233 - RNA, 20 nt, synthetic construct
  source 1..20: mol_type = other RNA
agggtttctctgtgtagccc

SEQ ID NO: 6234 - RNA, 20 nt, synthetic construct
  source 1..20: mol_type = other RNA
tcttttggtttttcaagaca

SEQ ID NO: 6235 - RNA, 20 nt, synthetic construct
  source 1..20: mol_type = other RNA
ttcttttggtttttcaagac

SEQ ID NO: 6236 - RNA, 20 nt, synthetic construct
  source 1..20: mol_type = other RNA
acagctttctttttttcttt

SEQ ID NO: 6237 - RNA, 20 nt, synthetic construct
  source 1..20: mol_type = other RNA
tatattaatatagcaaagca

SEQ ID NO: 6238 - RNA, 20 nt, synthetic construct
  source 1..20: mol_type = other RNA
atatattaatatagcaaagc

SEQ ID NO: 6239 - RNA, 20 nt, synthetic construct
  source 1..20: mol_type = other RNA
tgttttttcttatagaatta

SEQ ID NO: 6240 - RNA, 20 nt, synthetic construct
  source 1..20: mol_type = other RNA
ttctggagggaggaaaagga

SEQ ID NO: 6241 - RNA, 20 nt, synthetic construct
  source 1..20: mol_type = other RNA
ctcattctggagggaggaaa

SEQ ID NO: 6242 - protein, 1379 aa, synthetic construct
MDKKYSIGLDIGTNSVGWAVITDEYKVPSKKFKVLGNTDRHSIKKNLIGALLFDSGETAEATRLKRTARRRYTRRKNRICYLQEIFSNEMAKVDDSFFHRLEESFLVEEDKKHERHPIFGNIVDEVAYHEKYPTIYHLRKKLVDSTDKADLRLIYLALAHMIKFRGHFLIEGDLNPDNSDVDKLFIQLVQTYNQLFEENPINASGVDAKAILSARLSKSRRLENLIAQLPGEKKNGLFGNLIALSLGLTPNFKSNFDLAEDAKLQLSKDTYDDDLDNLLAQIGDQYADLFLAAKNLSDAILLSDILRVNTEITKAPLSASMIKRYDEHHQDLTLLKALVRQQLPEKYKEIFFDQSKNGYAGYIDGGASQEEFYKFIKPILEKMDGTEELLVKLNREDLLRKQRTFDNGSIPHQIHLGELHAILRRQEDFYPFLKDNREKIEKILTFRIPYYVGPLARGNSRFAWMTRKSEETITPWNFEEVVDKGASAQSFIERMTNFDKNLPNEKVLPKHSLLYEYFTVYNELTKVKYVTEGMRKPAFLSGEQKKAIVDLLFKTNRKVTVKQLKEDYFKKIECFDSVEISGVEDRFNASLGTYHDLLKIIKDKDFLDNEENEDILEDIVLTLTLFEDREMIEERLKTYAHLFDDKVMKQLKRRRYTGWGRLSRKLINGIRDKQSGKTILDFLKSDGFANRNFMQLIHDDSLTFKEDIQKAQVSGQGDSLHEHIANLAGSPAIKKGILQTVKVVDELVKVMGRHKPENIVIEMARENQTTQKGQKNSRERMKRIEEGIKELGSQILKEHPVENTQLQNEKLYLYYLQNGRDMYVDQELDINRLSDYDVDHIVPQSFLKDDSIDNKVLTRSDKNRGKSDNVPSEEVVKKMKNYWRQLLNAKLITQRKFDNLTKAERGGLSELDKAGFIKRQLVETRQITKHVAQILDSRMNTKYDENDKLIREVKVITLKSKLVSDFRKDFQFYKVREINNYHHAHDAYLNAVVGTALIKKYPKLESEFVYGDYKVYDVRKMIAKSEQEIGKATAKYFFYSNIMNFFKTEITLANGEIRKRPLIETNGETGEIVWDKGRDFATVRKVLSMPQVNIVKKTEVQTGGFSKESILPKRNSDKLIARKKDWDPKKYGGFDSPTVAYSVLVVAKVEKGKSKKLKSVKELLGITIMERSSFEKNPIDFLEAKGYKEVKKDLIIKLPKYSLFELENGRKRMLASAGELQKGNELALPSKYVNFLYLASHYEKLKGSPEDNEQKQLFVEQHKHYLDEIIEQISEFSKRVILADANLDKVLSAYNKHRDKPIREQAENIIHLFTLTNLGAPAAFKYFDTTIDRKRYTSTKEVLDATLIHQSITGLYETRIDLSQLGGDGGGSPKKKRKV

SEQ ID NO: 6243 - RNA, 4514 nt, synthetic construct
  source 1..4514: mol_type = other RNA
gggtcccgcagtcggcgtccagcggctctgcttgttcgtgtgtgtgtcgttgcaggccttattcggatccatggataagaagtactcaatcgggctggatatcggaactaattccgtgggttgggcagtgatcacggatgaatacaaagtgccgtccaagaagttcaaggtcctggggaacaccgatagacacagcatcaagaaaaatctcatcggagccctgctgtttgactccggcgaaaccgcagaagcgacccggctcaaacgtaccgcgaggcgacgctacacccggcggaagaatcgcatctgctatctgcaagagatcttttcgaacgaaatggcaaaggtcgacgacagcttcttccaccgcctggaagaatctttcctggtggaggaggacaagaagcatgaacggcatcctatctttggaaacatcgtcgacgaagtggcgtaccacgaaaagtacccgaccatctaccatctgcggaagaagttggttgactcaactgacaaggccgacctcagattgatctacttggccctcgcccatatgatcaaattccgcggacacttcctgatcgaaggcgatctgaaccctgataactccgacgtggataagcttttcattcaactggtgcagacctacaaccaactgttcgaagaaaacccaatcaatgctagcggcgtcgatgccaaggccatcctgtccgcccggctgtcgaagtcgcggcgcctcgaaaacctgatcgcacagctgccgggagagaaaaagaacggacttttcggcaacttgatcgctctctcactgggactcactcccaatttcaagtccaattttgacctggccgaggacgcgaagctgcaactctcaaaggacacctacgacgacgacttggacaatttgctggcacaaattggcgatcagtacgcggatctgttccttgccgctaagaacctttcggacgcaatcttgctgtccgatatcctgcgcgtgaacaccgaaataaccaaagcgccgcttagcgcctcgatgattaagcggtacgacgagcatcaccaggatctcacgctgctcaaagcgctcgtgagacagcaactgcctgaaaagtacaaggagatcttcttcgaccagtccaagaatgggtacgcagggtacatcgatggaggcgctagccaggaagagttctataagttcatcaagccaatcctggaaaagatggacggaaccgaagaactgctggtcaagctgaacagggaggatctgctccggaaacagagaacctttgacaacggatccattccccaccagatccatctgggtgagctgcacgccatcttgcggcgccaggaggacttttacccattcctcaaggacaaccgggaaaagatcgagaaaattctgacgttccgcatcccgtattacgtgggcccactggcgcgcggcaattcgcgcttcgcgtggatgactagaaaatcagaggaaaccatcactccttggaatttcgaggaagttgtggataagggagcttcggcacaaagcttcatcgaacgaatgaccaacttcgacaagaatctcccaaacgagaaggtgcttcctaagcacagcctcctttacgaatacttcactgtctacaacgaactgactaaagtgaaatacgttactgaaggaatgaggaagccggcctttctgtccggagaacagaagaaagcaattgtcgatctgctgttcaagaccaaccgcaaggtgaccgtcaagcagcttaaagaggactacttcaagaagatcgagtgtttcgactcagtggaaatcagcggggtggaggacagattcaacgcttcgctgggaacctatcatgatctcctgaagatcatcaaggacaaggacttccttgacaacgaggagaacgaggacatcctggaagatatcgtcctgaccttgacccttttcgaggatcgcgagatgatcgaggagaggcttaagacctacgctcatctcttcgacgataaggtcatgaaacaactcaagcgccgccggtacactggttggggccgcctctcccgcaagctgatcaacggtattcgcgataaacagagcggtaaaactatcctggatttcctcaaatcggatggcttcgctaatcgtaacttcatgcaattgatccacgacgacagcctgacctttaaggaggacatccaaaaagcacaagtgtccggacagggagactcactccatgaacacatcgcgaatctggccggttcgccggcgattaagaagggaattctgcaaactgtgaaggtggtcgacgagctggtgaaggtcatgggacggcacaaaccggagaatatcgtgattgaaatggcccgagaaaaccagactacccagaagggccagaaaaactcccgcgaaaggatgaagcggatcgaagaaggaatcaaggagctgggcagccagatcctgaaagagcacccggtggaaaacacgcagctgcagaacgagaagctctacctgtactatttgcaaaatggacgggacatgtacgtggaccaagagctggacatcaatcggttgtctgattacgacgtggaccacatcgttccacagtcctttctgaaggatgactcgatcgataacaaggtgttgactcgcagcgacaagaacagagggaagtcagataatgtgccatcggaggaggtcgtgaagaagatgaagaattactggcggcagctcctgaatgcgaagctgattacccagagaaagtttgacaatctcactaaagccgagcgcggcggactctcagagctggataaggctggattcatcaaacggcagctggtcgagactcggcagattaccaagcacgtggcgcagatcttggactcccgcatgaacactaaatacgacgagaacgataagctcatccgggaagtgaaggtgattaccctgaaaagcaaacttgtgtcggactttcggaaggactttcagttttacaaagtgagagaaatcaacaactaccatcacgcgcatgacgcatacctcaacgctgtggtcggtaccgccctgatcaaaaagtaccctaaacttgaatcggagtttgtgtacggagactacaaggtctacgacgtgaggaagatgatagccaagtccgaacaggaaatcgggaaagcaactgcgaaatacttcttttactcaaacatcatgaactttttcaagactgaaattacgctggccaatggagaaatcaggaagaggccactgatcgaaactaacggagaaacgggcgaaatcgtgtgggacaagggcagggacttcgcaactgttcgcaaagtgctctctatgccgcaagtcaatattgtgaagaaaaccgaagtgcaaaccggcggattttcaaaggaatcgatcctcccaaagagaaatagcgacaagctcattgcacgcaagaaagactgggacccgaagaagtacggaggattcgattcgccgactgtcgcatactccgtcctcgtggtggccaaggtggagaagggaaagagcaaaaagctcaaatccgtcaaagagctgctggggattaccatcatggaacgatcctcgttcgagaagaacccgattgatttcctcgaggcgaagggttacaaggaggtgaagaaggatctgatcatcaaactccccaagtactcactgttcgaactggaaaatggtcggaagcgcatgctggcttcggccggagaactccaaaaaggaaatgagctggccttgcctagcaagtacgtcaacttcctctatcttgcttcgcactacgaaaaactcaaagggtcaccggaagataacgaacagaagcagcttttcgtggagcagcacaagcattatctggatgaaatcatcgaacaaatctccgagttttcaaagcgcgtgatcctcgccgacgccaacctcgacaaagtcctgtcggcctacaataagcatagagataagccgatcagagaacaggccgagaacattatccacttgttcaccctgactaacctgggagccccagccgccttcaagtacttcgatactactatcgatcgcaaaagatacacgtccaccaaggaagttctggacgcgaccctgatccaccaaagcatcactggactctacgaaactaggatcgatctgtcgcagctgggtggcgatggcggtggatctccgaaaaagaagagaaaggtgtaatgagctagccatcacatttaaaagcatctcagcctaccatgagaataagagaaagaaaatgaagatcaatagcttattcatctctttttctttttcgttggtgtaaagccaacaccctgtctaaaaaacataaatttctttaatcattttgcctcttttctctgtgcttcaattaataaaaaatggaaagaacctcgagaaaaaaaaaaaaaaaaaaaaaaaaaaaaaaaaaaaaaaaaaaaaaaaaaaaaaaaaaaaaaaaaaaaaaaaaaaaaaaaaaaaaaaaaaaaaaaaaaaaatctag

SEQ ID NO: 6244 - DNA, 4245 bp, synthetic construct
  source 1..4245: mol_type = other DNA
atggcccccaagaagaagcggaaggtgggcatccacggcgtgcccgccgccgacaagaagtacagcatcggcctggacatcggcaccaacagcgtgggctgggccgtgatcaccgacgagtacaaggtgcccagcaagaagttcaaggtgctgggcaacaccgaccggcacagcatcaagaagaacctgatcggcgccctgctgttcgacagcggcgagaccgccgaggccacccggctgaagcggaccgcccggcggcggtacacccggcggaagaaccggatctgctacctgcaggagatcttcagcaacgagatggccaaggtggacgacagcttcttccaccggctggaggagagcttcctggtggaggaggacaagaagcacgagcggcaccccatcttcggcaacatcgtggacgaggtggcctaccacgagaagtaccccaccatctaccacctgcggaagaagctggtggacagcaccgacaaggccgacctgcggctgatctacctggccctggcccacatgatcaagttccggggccacttcctgatcgagggcgacctgaaccccgacaacagcgacgtggacaagctgttcatccagctggtgcagacctacaaccagctgttcgaggagaaccccatcaacgccagcggcgtggacgccaaggccatcctgagcgcccggctgagcaagagccggcggctggagaacctgatcgcccagctgcccggcgagaagaagaacggcctgttcggcaacctgatcgccctgagcctgggcctgacccccaacttcaagagcaacttcgacctggccgaggacgccaagctgcagctgagcaaggacacctacgacgacgacctggacaacctgctggcccagatcggcgaccagtacgccgacctgttcctggccgccaagaacctgagcgacgccatcctgctgagcgacatcctgcgggtgaacaccgagatcaccaaggcccccctgagcgccagcatgatcaagcggtacgacgagcaccaccaggacctgaccctgctgaaggccctggtgcggcagcagctgcccgagaagtacaaggagatcttcttcgaccagagcaagaacggctacgccggctacatcgacggcggcgccagccaggaggagttctacaagttcatcaagcccatcctggagaagatggacggcaccgaggagctgctggtgaagctgaaccgggaggacctgctgcggaagcagcggaccttcgacaacggcagcatcccccaccagatccacctgggcgagctgcacgccatcctgcggcggcaggaggacttctaccccttcctgaaggacaaccgggagaagatcgagaagatcctgaccttccggatcccctactacgtgggccccctggcccggggcaacagccggttcgcctggatgacccggaagagcgaggagaccatcaccccctggaacttcgaggaggtggtggacaagggcgccagcgcccagagcttcatcgagcggatgaccaacttcgacaagaacctgcccaacgagaaggtgctgcccaagcacagcctgctgtacgagtacttcaccgtgtacaacgagctgaccaaggtgaagtacgtgaccgagggcatgcggaagcccgccttcctgagcggcgagcagaagaaggccatcgtggacctgctgttcaagaccaaccggaaggtgaccgtgaagcagctgaaggaggactacttcaagaagatcgagtgcttcgacagcgtggagatcagcggcgtggaggaccggttcaacgccagcctgggcacctaccacgacctgctgaagatcatcaaggacaaggacttcctggacaacgaggagaacgaggacatcctggaggacatcgtgctgaccctgaccctgttcgaggaccgggagatgatcgaggagcggctgaagacctacgcccacctgttcgacgacaaggtgatgaagcagctgaagcggcggcggtacaccggctggggccggctgagccggaagctgatcaacggcatccgggacaagcagagcggcaagaccatcctggacttcctgaagagcgacggcttcgccaaccggaacttcatgcagctgatccacgacgacagcctgaccttcaaggaggacatccagaaggcccaggtgagcggccagggcgacagcctgcacgagcacatcgccaacctggccggcagccccgccatcaagaagggcatcctgcagaccgtgaaggtggtggacgagctggtgaaggtgatgggccggcacaagcccgagaacatcgtgatcgagatggcccgggagaaccagaccacccagaagggccagaagaacagccgggagcggatgaagcggatcgaggagggcatcaaggagctgggcagccagatcctgaaggagcaccccgtggagaacacccagctgcagaacgagaagctgtacctgtactacctgcagaacggccgggacatgtacgtggaccaggagctggacatcaaccggctgagcgactacgacgtggaccacatcgtgccccagagcttcctgaaggacgacagcatcgacaacaaggtgctgacccggagcgacaagaaccggggcaagagcgacaacgtgcccagcgaggaggtggtgaagaagatgaagaactactggcggcagctgctgaacgccaagctgatcacccagcggaagttcgacaacctgaccaaggccgagcggggcggcctgagcgagctggacaaggccggcttcatcaagcggcagctggtggagacccggcagatcaccaagcacgtggcccagatcctggacagccggatgaacaccaagtacgacgagaacgacaagctgatccgggaggtgaaggtgatcaccctgaagagcaagctggtgagcgacttccggaaggacttccagttctacaaggtgcgggagatcaacaactaccaccacgcccacgacgcctacctgaacgccgtggtgggcaccgccctgatcaagaagtaccccaagctggagagcgagttcgtgtacggcgactacaaggtgtacgacgtgcggaagatgatcgccaagagcgagcaggagatcggcaaggccaccgccaagtacttcttctacagcaacatcatgaacttcttcaagaccgagatcaccctggccaacggcgagatccggaagcggcccctgatcgagaccaacggcgagaccggcgagatcgtgtgggacaagggccgggacttcgccaccgtgcggaaggtgctgagcatgccccaggtgaacatcgtgaagaagaccgaggtgcagaccggcggcttcagcaaggagagcatcctgcccaagcggaacagcgacaagctgatcgcccggaagaaggactgggaccccaagaagtacggcggcttcgacagccccaccgtggcctacagcgtgctggtggtggccaaggtggagaagggcaagagcaagaagctgaagagcgtgaaggagctgctgggcatcaccatcatggagcggagcagcttcgagaagaaccccatcgacttcctggaggccaagggctacaaggaggtgaagaaggacctgatcatcaagctgcccaagtacagcctgttcgagctggagaacggccggaagcggatgctggccagcgccggcgagctgcagaagggcaacgagctggccctgcccagcaagtacgtgaacttcctgtacctggccagccactacgagaagctgaagggcagccccgaggacaacgagcagaagcagctgttcgtggagcagcacaagcactacctggacgagatcatcgagcagatcagcgagttcagcaagcgggtgatcctggccgacgccaacctggacaaggtgctgagcgcctacaacaagcaccgggacaagcccatccgggagcaggccgagaacatcatccacctgttcaccctgaccaacctgggcgcccccgccgccttcaagtacttcgacaccaccatcgaccggaagcggtacaccagcaccaaggaggtgctggacgccaccctgatccaccagagcatcaccggcctgtacgagacccggatcgacctgagccagctgggcggcgacagcggcggcaagcggcccgccgccaccaagaaggccggccaggccaagaagaagaagggcagctacccctacgacgtgcccgactacgcctga

SEQ ID NO: 6245 - RNA, 4245 nt, synthetic construct
  source 1..4245: mol_type = other RNA
atggcccccaagaagaagcggaaggtgggcatccacggcgtgcccgccgccgacaagaagtacagcatcggcctggacatcggcaccaacagcgtgggctgggccgtgatcaccgacgagtacaaggtgcccagcaagaagttcaaggtgctgggcaacaccgaccggcacagcatcaagaagaacctgatcggcgccctgctgttcgacagcggcgagaccgccgaggccacccggctgaagcggaccgcccggcggcggtacacccggcggaagaaccggatctgctacctgcaggagatcttcagcaacgagatggccaaggtggacgacagcttcttccaccggctggaggagagcttcctggtggaggaggacaagaagcacgagcggcaccccatcttcggcaacatcgtggacgaggtggcctaccacgagaagtaccccaccatctaccacctgcggaagaagctggtggacagcaccgacaaggccgacctgcggctgatctacctggccctggcccacatgatcaagttccggggccacttcctgatcgagggcgacctgaaccccgacaacagcgacgtggacaagctgttcatccagctggtgcagacctacaaccagctgttcgaggagaaccccatcaacgccagcggcgtggacgccaaggccatcctgagcgcccggctgagcaagagccggcggctggagaacctgatcgcccagctgcccggcgagaagaagaacggcctgttcggcaacctgatcgccctgagcctgggcctgacccccaacttcaagagcaacttcgacctggccgaggacgccaagctgcagctgagcaaggacacctacgacgacgacctggacaacctgctggcccagatcggcgaccagtacgccgacctgttcctggccgccaagaacctgagcgacgccatcctgctgagcgacatcctgcgggtgaacaccgagatcaccaaggcccccctgagcgccagcatgatcaagcggtacgacgagcaccaccaggacctgaccctgctgaaggccctggtgcggcagcagctgcccgagaagtacaaggagatcttcttcgaccagagcaagaacggctacgccggctacatcgacggcggcgccagccaggaggagttctacaagttcatcaagcccatcctggagaagatggacggcaccgaggagctgctggtgaagctgaaccgggaggacctgctgcggaagcagcggaccttcgacaacggcagcatcccccaccagatccacctgggcgagctgcacgccatcctgcggcggcaggaggacttctaccccttcctgaaggacaaccgggagaagatcgagaagatcctgaccttccggatcccctactacgtgggccccctggcccggggcaacagccggttcgcctggatgacccggaagagcgaggagaccatcaccccctggaacttcgaggaggtggtggacaagggcgccagcgcccagagcttcatcgagcggatgaccaacttcgacaagaacctgcccaacgagaaggtgctgcccaagcacagcctgctgtacgagtacttcaccgtgtacaacgagctgaccaaggtgaagtacgtgaccgagggcatgcggaagcccgccttcctgagcggcgagcagaagaaggccatcgtggacctgctgttcaagaccaaccggaaggtgaccgtgaagcagctgaaggaggactacttcaagaagatcgagtgcttcgacagcgtggagatcagcggcgtggaggaccggttcaacgccagcctgggcacctaccacgacctgctgaagatcatcaaggacaaggacttcctggacaacgaggagaacgaggacatcctggaggacatcgtgctgaccctgaccctgttcgaggaccgggagatgatcgaggagcggctgaagacctacgcccacctgttcgacgacaaggtgatgaagcagctgaagcggcggcggtacaccggctggggccggctgagccggaagctgatcaacggcatccgggacaagcagagcggcaagaccatcctggacttcctgaagagcgacggcttcgccaaccggaacttcatgcagctgatccacgacgacagcctgaccttcaaggaggacatccagaaggcccaggtgagcggccagggcgacagcctgcacgagcacatcgccaacctggccggcagccccgccatcaagaagggcatcctgcagaccgtgaaggtggtggacgagctggtgaaggtgatgggccggcacaagcccgagaacatcgtgatcgagatggcccgggagaaccagaccacccagaagggccagaagaacagccgggagcggatgaagcggatcgaggagggcatcaaggagctgggcagccagatcctgaaggagcaccccgtggagaacacccagctgcagaacgagaagctgtacctgtactacctgcagaacggccgggacatgtacgtggaccaggagctggacatcaaccggctgagcgactacgacgtggaccacatcgtgccccagagcttcctgaaggacgacagcatcgacaacaaggtgctgacccggagcgacaagaaccggggcaagagcgacaacgtgcccagcgaggaggtggtgaagaagatgaagaactactggcggcagctgctgaacgccaagctgatcacccagcggaagttcgacaacctgaccaaggccgagcggggcggcctgagcgagctggacaaggccggcttcatcaagcggcagctggtggagacccggcagatcaccaagcacgtggcccagatcctggacagccggatgaacaccaagtacgacgagaacgacaagctgatccgggaggtgaaggtgatcaccctgaagagcaagctggtgagcgacttccggaaggacttccagttctacaaggtgcgggagatcaacaactaccaccacgcccacgacgcctacctgaacgccgtggtgggcaccgccctgatcaagaagtaccccaagctggagagcgagttcgtgtacggcgactacaaggtgtacgacgtgcggaagatgatcgccaagagcgagcaggagatcggcaaggccaccgccaagtacttcttctacagcaacatcatgaacttcttcaagaccgagatcaccctggccaacggcgagatccggaagcggcccctgatcgagaccaacggcgagaccggcgagatcgtgtgggacaagggccgggacttcgccaccgtgcggaaggtgctgagcatgccccaggtgaacatcgtgaagaagaccgaggtgcagaccggcggcttcagcaaggagagcatcctgcccaagcggaacagcgacaagctgatcgcccggaagaaggactgggaccccaagaagtacggcggcttcgacagccccaccgtggcctacagcgtgctggtggtggccaaggtggagaagggcaagagcaagaagctgaagagcgtgaaggagctgctgggcatcaccatcatggagcggagcagcttcgagaagaaccccatcgacttcctggaggccaagggctacaaggaggtgaagaaggacctgatcatcaagctgcccaagtacagcctgttcgagctggagaacggccggaagcggatgctggccagcgccggcgagctgcagaagggcaacgagctggccctgcccagcaagtacgtgaacttcctgtacctggccagccactacgagaagctgaagggcagccccgaggacaacgagcagaagcagctgttcgtggagcagcacaagcactacctggacgagatcatcgagcagatcagcgagttcagcaagcgggtgatcctggccgacgccaacctggacaaggtgctgagcgcctacaacaagcaccgggacaagcccatccgggagcaggccgagaacatcatccacctgttcaccctgaccaacctgggcgcccccgccgccttcaagtacttcgacaccaccatcgaccggaagcggtacaccagcaccaaggaggtgctggacgccaccctgatccaccagagcatcaccggcctgtacgagacccggatcgacctgagccagctgggcggcgacagcggcggcaagcggcccgccgccaccaagaaggccggccaggccaagaagaagaagggcagctacccctacgacgtgcccgactacgcctga

SEQ ID NO: 6246 - protein, 1414 aa, synthetic construct
MAPKKKRKVGIHGVPAADKKYSIGLDIGTNSVGWAVITDEYKVPSKKFKVLGNTDRHSIKKNLIGALLFDSGETAEATRLKRTARRRYTRRKNRICYLQEIFSNEMAKVDDSFFHRLEESFLVEEDKKHERHPIFGNIVDEVAYHEKYPTIYHLRKKLVDSTDKADLRLIYLALAHMIKFRGHFLIEGDLNPDNSDVDKLFIQLVQTYNQLFEENPINASGVDAKAILSARLSKSRRLENLIAQLPGEKKNGLFGNLIALSLGLTPNFKSNFDLAEDAKLQLSKDTYDDDLDNLLAQIGDQYADLFLAAKNLSDAILLSDILRVNTEITKAPLSASMIKRYDEHHQDLTLLKALVRQQLPEKYKEIFFDQSKNGYAGYIDGGASQEEFYKFIKPILEKMDGTEELLVKLNREDLLRKQRTFDNGSIPHQIHLGELHAILRRQEDFYPFLKDNREKIEKILTFRIPYYVGPLARGNSRFAWMTRKSEETITPWNFEEVVDKGASAQSFIERMTNFDKNLPNEKVLPKHSLLYEYFTVYNELTKVKYVTEGMRKPAFLSGEQKKAIVDLLFKTNRKVTVKQLKEDYFKKIECFDSVEISGVEDRFNASLGTYHDLLKIIKDKDFLDNEENEDILEDIVLTLTLFEDREMIEERLKTYAHLFDDKVMKQLKRRRYTGWGRLSRKLINGIRDKQSGKTILDFLKSDGFANRNFMQLIHDDSLTFKEDIQKAQVSGQGDSLHEHIANLAGSPAIKKGILQTVKVVDELVKVMGRHKPENIVIEMARENQTTQKGQKNSRERMKRIEEGIKELGSQILKEHPVENTQLQNEKLYLYYLQNGRDMYVDQELDINRLSDYDVDHIVPQSFLKDDSIDNKVLTRSDKNRGKSDNVPSEEVVKKMKNYWRQLLNAKLITQRKFDNLTKAERGGLSELDKAGFIKRQLVETRQITKHVAQILDSRMNTKYDENDKLIREVKVITLKSKLVSDFRKDFQFYKVREINNYHHAHDAYLNAVVGTALIKKYPKLESEFVYGDYKVYDVRKMIAKSEQEIGKATAKYFFYSNIMNFFKTEITLANGEIRKRPLIETNGETGEIVWDKGRDFATVRKVLSMPQVNIVKKTEVQTGGFSKESILPKRNSDKLIARKKDWDPKKYGGFDSPTVAYSVLVVAKVEKGKSKKLKSVKELLGITIMERSSFEKNPIDFLEAKGYKEVKKDLIIKLPKYSLFELENGRKRMLASAGELQKGNELALPSKYVNFLYLASHYEKLKGSPEDNEQKQLFVEQHKHYLDEIIEQISEFSKRVILADANLDKVLSAYNKHRDKPIREQAENIIHLFTLTNLGAPAAFKYFDTTIDRKRYTSTKEVLDATLIHQSITGLYETRIDLSQLGGDSGGKRPAATKKAGQAKKKKGSYPYDVPDYA

SEQ ID NO: 6247 - DNA, 4925 bp, synthetic construct
  source 1..4925: mol_type = other DNA
ctagaactactgcacgatccaggatatcaatagttaagaaactaagacattggttcacttgctcaacttaaccaaaacaccacagacgggcttgcatatgacaacagttctagaggatcaaatgtccctgatcaaatgccctagcaggttctgtgtctgatgagggctgctggttcatgggtggtgctttttctcagtgtccttacaggtggaaggtatccagctttcttggaccttatattaaagcacgcattccattgatgtgagtagatagcttagtcagagccccaaagtgatttaagcacctccaaaaccctccgtctccggatgctcccccattggtgaacagatttcaacatagcaattgagcaggaggaaaggaagccaaattatttgatcacagccagtactttggtgaacacccaaacccagcatggagctgaatatctgtaatctcagtatccagcaggtggatattggggaattaagacttcaaggccagacttggctacatagtaagtttgatgccatcctgggctatatgagatcctgtttccaaaacccccaaatagaaacaataaaaaaatggcagtccttcatgttcactgctaccctagaaggtcagttttgcttgtaacagatgactaacagaggaacaaggtcccggaagagctaccagtatgctggctgccaatgaagctgctgaagtcttagtagatttaggagctatggtcctgacttccatcacagccccagcaccaccatgggcactgcccagcagtctatcttcttttaggtcttcaggtgtccctgggtagagaacaaggcttctgcttgcatagggctgatgccccagtacagtgacagtctcacaatgagtgcagcaatgtggccacagaacggggaaatgtgtgttctttaactagtagcttttataatcatgataaaaagataagtgtctactctcaagctgaaagcttttcacaggcatctgattctcttgctaaatgacaaagtggttagaggagggacctacagctttcattgtctacactcaggtttcttttgagaattttacagtaggtatgtattgttttctagtcaacacagaaataaaaggatttgttttgttgaaaagaagtgggggttttggtactgatgaggggaaattgatttatgttacttattcattctcaggttcatggctgagactccttatgacaaatgatagattaataaaagcatgcaaatgctggagctctgctggcggagtacctgatatgcaaggatgaagatctctgttcaatccccagaaatcaaataaaaaagctgggcatagtgaggaagaggagatgggaggattcctgtggctggctggacagctaacctagcctattcatctatttccaggccactaagggatggtaccttaaaaaataacaataataataaaaaataacaataataataaataaaaaaggtagctggttcctgaggagcatctaaggatatcctttaactccacgtgcacatacactgtatacacaggaacacatacaagcatgcagatttacctatcaagttttaccaaaaaaaaaaaaaaaaaaaaaaaagaacactttattcactgttggtgggtatgtaaactggcatatgtagccactatgaaaatcagcacagaggttcccttcccactccaacaaaacaaaacaaaacaaaacaaaacaaaacaaaacaaaacaaaacaaaaccctctagaactagaactagaactactgcacgactataatgatgatcttgttctttctgtttaattttactgtccctagcttcttagcatctgcggatgtttttcctggcagatatttactcaccatgacttcttccagaaggggtgttggtagctttcatgtgactatttctatttcacttttccatgtaacgagtgatgctgttggatttctctttcattaattagattttttctgtctcatccttttgctttagccacattgggattatcgtctaccgaggatgaaggcgaggacccctggtaccaaaaagcatgcaagtgcgattgccaaggaggacccaatgctctgtggtctgcaggtgccacctccttggactgtataccagaatgcccatatcacaagcctctgggtttcgagtcaggggaggtcacaccggaccagatcacctgctctaacccggagcagtatgtgggctggtattcttcgtggactgcaaacaaggcccggctcaacagtcaaggctttgggtgtgcctggctctccaagttccaggacagtagccagtggttacagatagatctgaaggagatcaaagtgatttcagggatcctcacccaggggcgctgtgacatcgatgagtggatgaccaagtacagcgtgcagtacaggaccgatgagcgcctgaactggatttactacaaggaccagactggaaacaaccgggtcttctatggcaactcggaccgcacctccacggttcagaacctgctgcggccccccatcatctcccgcttcatccgcctcatcccgctgggctggcacgtccgcattgccatccggatggagctgctggagtgcgtcagcaagtgtgcctgacagacatgataagatacattgatgagtttggacaaaccacaactagaatgcagtgaaaaaaatgctttatttgtgaaatttgtgatgctattgctttatttgtaaccattataagctgcaataaacaagttaacaacaacaattgcattcattttatgtttcaggttcagggggaggtgtgggaggttttttaaagcaagtaaaacctctacaaatgtggtagagggcctatttcccatgattccttcatatttgcatatacgatacaaggctgttagagagataattggaattaatttgactgtaaacacaaagatattagtacaaaatacgtgacgtagaaagtaataatttcttgggtagtttgcagttttaaaattatgttttaaaatggactatcatatgcttaccgtaacttgaaagtatttcgatttcttggctttatatatcttgtggaaaggacgaaacaccgctagaactactgcacgatccagggttttagagctagaaatagcaagttaaaataaggctagtccgttatcaacttgaaaaagtggcaccgagtcggtgctttttttttccaggtttaccactcctaggtatttactcaaaggactctatacgtcaacctgtgacagaggcatcatatacaagcagggagtggtggcacctgcctttaatcccacccctcaggaggcagagtcaggtagatctctgtgagttcgaggccagtttggtctacatagtgagttctagtacagccataagaccatatagccatatggaggggggattgtgagcatagagtatgaatgttcttgagagaattattaaatgaattggaattattatacactgtcttctttcataggaaaaatgaacagaaagggagagatctttgggtggggctaacagcatacatgacatgaaagcagaaggggattagttattggaaggcagggagggacccaggaggatgaagggaagagaatgcaagggaaaggagtaaaggaggaggaggtagaggtacacactattaattccagcacttgtgaggaggggacagagctctgtgagttcaaggtcagccccctctgcatagtcagttccaggatagccaatggctacataatgagaccctgtgtcagagaaggtggccggcgagggatattgatgcttacagtttactttagccaccacacagctgaatgagttaaacctgttcctgctacttttgcactttcaatgctcccagattacttacatggaatttatattttattgtggtttaatagctcctgtacatcatagacaaacctcaagaaaaattttcaaccaatagtccaggcaaaaataacctctttttctttctttctttctttctttttttttttttttttttggttttttgaaacagggtttctctgtatagccctggctgtcctggaactcactttgtacaccaggctggcctcgaactcagaaatccacctgcctctgcctcccgagtgctcggattaaaggcgtgcaccaccaccgtcccgcaaaaaataacctgtttttgttgttttaattatttttaagattttatgtgtatgggtgtctgtctgtatgtatgtctgtgtaccacttgtatgcttggtgcccaagaaggacagaacagatcatagggtttcctgggataagagttataggagttatagatgactgtaagccaccaagtggacgctgggaattgaaccttggttagctggaagagtgtccagtatttttaattccagtccccgttgtttgtctatgaagattttgcttggtagtccagtctggctttaagaaacagggtctcatgcatccctggcttgctcagacttccatgcagctgaggatggctttagagtaacaaccctcctgccttttcctcgtagagtgctgagattacagtcctgtgccaccagcagacttctcctaacaagaatgtggcacagggaggcaactgggaatcaaacaggaaggaggagtaaaaggaaggggaggaaggagaggagaagtggcaggaggagaagaaaaaggaggcggagaaaaggtggtagtggtggaggaagaggaggaggaggaggaggaggaggagggggacttaatcagtaaaggaaaaaggctgagctcagtccttggaacctacatggtaggagagaatgagacttctgcaaagtttcctctgatccccacactggagcaatggtgccatcacatcactctcccacttcacccaactcctggatcgtgcagtagttctag

SEQ ID NO: 6248 - DNA, 5034 bp, synthetic construct
  source 1..5034: mol_type = other DNA
ctagaactactgcacgatccaggaggcatctgattctcttgctaaatgacaaagtggttagaggagggacctacagctttcattgtctacactcaggtttcttttgagaattttacagtaggtatgtattgttttctagtcaacacagaaataaaaggatttgttttgttgaaaagaagtgggggttttggtactgatgaggggaaattgatttatgttacttattcattctcaggttcatggctgagactccttatgacaaatgatagattaataaaagcatgcaaatgctggagctctgctggcggagtacctgatatgcaaggatgaagatctctgttcaatccccagaaatcaaataaaaaagctgggcatagtgaggaagaggagatgggaggattcctgtggctggctggacagctaacctagcctattcatctatttccaggccactaagggatggtaccttaaaaaataacaataataataaaaaataacaataataataaataaaaaaggtagctggttcctgaggagcatctaaggatatcctttaactccacgtgcacatacactgtatacacaggaacacatacaagcatgcagatttacctatcaagttttaccaaaaaaaaaaaaaaaaaaaaaaaagaacactttattcactgttggtgggtatgtaaactggcatatgtagccactatgaaaatcagcacagaggttcccttcccactccaacaaaacaaaacaaaacaaaacaaaacaaaacaaaacaaaacaaaacaaaaccctctagaactagaactagaactactgcacgactataatgatgatcttgttctttctgtttaattttactgtccctagcttcttagcatctgcggatgtttttcctggcagatatttactcaccatgacttcttccagaaggggtgttggtagctttcatgtgactatttctatttcacttttccatgtaacgagtgatgctgttggatttctctttcattaattagattttttctgtctcatccttttgctttagccacattgggattatcgtctaccgaggatgaaggcgaggacccctggtaccaaaaagcatgcaagtgcgattgccaaggaggacccaatgctctgtggtctgcaggtgccacctccttggactgtataccagaatgcccatatcacaagcctctgggtttcgagtcaggggaggtcacaccggaccagatcacctgctctaacccggagcagtatgtgggctggtattcttcgtggactgcaaacaaggcccggctcaacagtcaaggctttgggtgtgcctggctctccaagttccaggacagtagccagtggttacagatagatctgaaggagatcaaagtgatttcagggatcctcacccaggggcgctgtgacatcgatgagtggatgaccaagtacagcgtgcagtacaggaccgatgagcgcctgaactggatttactacaaggaccagactggaaacaaccgggtcttctatggcaactcggaccgcacctccacggttcagaacctgctgcggccccccatcatctcccgcttcatccgcctcatcccgctgggctggcacgtccgcattgccatccggatggagctgctggagtgcgtcagcaagtgtgcctgatgcctgcctcagctcggcgcctgccagggggtgactggcacagagcgggccgtaggggaccccctcacacaccaccgagatggacagggctatatttcgcaaagcaattgtaactgcagtgctgggtagataatttttttttttttaagatatagctttctgatttcaatgaaataaaaatgaacttattccccactcagggccagagaaagtcagaacaaagaaaatgtccccgaaacgaattttcttacaaaagcctaagtagcaggggtaattttctgctcattttttgtctcagtgatactgtgaaaggtgcagtctcaggggaacacaaagcagccctgataatttgaaaattcatttgctttaccacattcaagacagaaacatacagtttcctaaagcctggctttgaatgcagaagggagcagctcctcctagttaagtttccactaaatcatcgccaaagaggacttcagagccctggggaggcagctgagggtctcaagggtgactgggtggcagggatgagtgcggtgggtgagaatcccggtgccctgagaggctatacgtgacaaatgaccaaaagcccaaggtaggggagtttcctctgctcacagttcttaccttcaaggcggatctgggcttccaccctcatgaacacagggattggggagggaccagagcgcccaatacacacagctccattatgcaatccattccagcaaattccccgtgtctgtggtcaccatttaggtgatcatacaggacaggctgcacatctcagtatatgtagggaccccaaatgaccacaacacagtacaattgccctttacctagggctaccatttcctagcaaaccaaacatagttcgagaacagctggcccaggagctaccactggctactcagaggaggctcattagctggctacatgcttcgcaggaagtgggaaggactcacatcataaaaaggaccatgtagctttttccctgaaagcttctcaccctccaccctctgccttgcaatacgcaaactgcgcctgctcctgaaaagctctctgggaaggaatgggcctggctttccgttcctggaggcggcgccttagattgggaggcctcattggccacttagagcgcagcctgagtttccaggccccttcctgggagaggctgttaacacgggggaggggcaggagagggatatggagagcaggtggtggaatcagaggacgaggctgctctaaagactgttctggccccagacacagggtagtctttgctagcagctcatttccgagttacttttcattttcaaatgccaaggcaagtgactagactcgcgctaatacagtgctggacaacacattcaccttttctgtgaacaggcagccttctaaaagccccaaacatccttcttgatgctttgggggctcaattattttatatccaacccagcatctttctagtccctatgctgtatgcttgaacttcggaaaatgcttttccccgcccaatcttctctcaaatataaacacatcacacagggtgttgggggtggggggggggggtggggggacttatccctggccttaggacacaggacaaatctattttggatagaaatgcctgaacagagacccttatttggaaaggtgaattaactttggtcacgacatggactgtcagacaaaatggcagtatcctaagagttaaggcacatcaaacacaggagtcgagagagtgcagttcagggaaaaaggagaggaggaaacagtgaggcagggagaaaggctttccaaataagagttcatgttggaaacttttgtcacggctttattgagattaagttcacatacaatttgtatccatttaaagtatacaatttgatgacttttggtatattcagagttgtgcaaccattatcactagatcaattttagaaagtttatcaccccaaagagaaatcctgcacccatcagccaacactccccaacccatcggccaccccaagccctctgcaaccacgaatcgactgtctctgtagattggccttctggacgttctacataaatgaaatcatatagtatgtggtagagggcctatttcccatgattccttcatatttgcatatacgatacaaggctgttagagagataattggaattaatttgactgtaaacacaaagatattagtacaaaatacgtgacgtagaaagtaataatttcttgggtagtttgcagttttaaaattatgttttaaaatggactatcatatgcttaccgtaacttgaaagtatttcgatttcttggctttatatatcttgtggaaaggacgaaacaccgctagaactactgcacgatccagggttttagagctagaaatagcaagttaaaataaggctagtccgttatcaacttgaaaaagtggcaccgagtcggtgctttttttttccaggtttaccactcctaggtatttactcaaaggactctatacgtcaacctgtgacagaggcatcatatacaagcagggagtggtggcacctgcctttaatcccacccctcaggaggcagagtcaggtagatctctgtgagttcgaggccagtttggtctacatagtgagttctagtacagccataagaccatatagccatatggaggggggattgtgagcatagagtatgaatgttcttgagagaattattaaatgaattggaattattatacactgtcttctttcataggaaaaatgaacagaaagggagagatctttgggtggggctaacagcatacatgacatgaaagcagaaggggattagttattggaaggcagggagggacccaggaggatgaagggaagagaatgcaagggaaaggagtaaaggaggaggaggtagaggtacacactattaattccagcacttgtgaggaggggacagagctctgtgagttcaaggtcagccccctctgcatagtcagttccaggatagccaatggctacataatgagaccctgtgtcagagaaggtggccggcgagggatattgatgcttacagtttactttagccaccacacagctgaatgagttaaacctgttcctgctacttttgcactttcaatgctcccagattacttacatggaatttatattttattgtggtttaatagctcctgtacatcatagacaaacctcaagaaaaattttcaaccaatagtccaggcaaaaataacctctttttctttctttctttctttctttttttttttttttttttggttttttgaaacagggtttctctgtatagccctggctgtcctggaactcactttgtacaccaggctggcctggatcgtgcagtagttctag

SEQ ID NO: 6249 - DNA, 4296 bp, synthetic construct
  source 1..4296: mol_type = other DNA
ctagaactactgcacgatccaggaagaggagatgggaggattcctgtggctggctggacagctaacctagcctattcatctatttccaggccactaagggatggtaccttaaaaaataacaataataataaaaaataacaataataataaataaaaaaggtagctggttcctgaggagcatctaaggatatcctttaactccacgtgcacatacactgtatacacaggaacacatacaagcatgcagatttacctatcaagttttaccaaaaaaaaaaaaaaaaaaaaaaaagaacactttattcactgttggtgggtatgtaaactggcatatgtagccactatgaaaatcagcacagaggttcccttcccactccaacaaaacaaaacaaaacaaaacaaaacaaaacaaaacaaaacaaaacaaaaccctctagaactagaactagaactactgcacgactataatgatgatcttgttctttctgtttaattttactgtccctagcttcttagcatctgcggatgtttttcctggcagatatttactcaccatgacttcttccagaaggggtgttggtagctttcatgtgactatttctatttcacttttccatgtaacgagtgatgctgttggatttctctttcattaattagattttttctgtctcatccttttgctttagccacattgggattatcgtctaccgaggatgaaggcgaggacccctggtaccaaaaagcatgcaagtgcgattgccaaggaggacccaatgctctgtggtctgcaggtgccacctccttggactgtataccagaatgcccatatcacaagcctctgggtttcgagtcaggggaggtcacaccggaccagatcacctgctctaacccggagcagtatgtgggctggtattcttcgtggactgcaaacaaggcccggctcaacagtcaaggctttgggtgtgcctggctctccaagttccaggacagtagccagtggttacagatagatctgaaggagatcaaagtgatttcagggatcctcacccaggggcgctgtgacatcgatgagtggatgaccaagtacagcgtgcagtacaggaccgatgagcgcctgaactggatttactacaaggaccagactggaaacaaccgggtcttctatggcaactcggaccgcacctccacggttcagaacctgctgcggccccccatcatctcccgcttcatccgcctcatcccgctgggctggcacgtccgcattgccatccggatggagctgctggagtgcgtcagcaagtgtgcctgatgcctgcctcagctcggcgcctgccagggggtgactggcacagagcgggccgtaggggaccccctcacacaccaccgagatggacagggctatatttcgcaaagcaattgtaactgcagtgctgggtagataatttttttttttttaagatatagctttctgatttcaatgaaataaaaatgaacttattccccactcagggccagagaaagtcagaacaaagaaaatgtccccgaaacgaattttcttacaaaagcctaagtagcaggggtaattttctgctcattttttgtctcagtgatactgtgaaaggtgcagtctcaggggaacacaaagcagccctgataatttgaaaattcatttgctttaccacattcaagacagaaacatacagtttcctaaagcctggctttgaatgcagaagggagcagctcctcctagttaagtttccactaaatcatcgccaaagaggacttcagagccctggggaggcagctgagggtctcaagggtgactgggtggcagggatgagtgcggtgggtgagaatcccggtgccctgagaggctatacgtgacaaatgaccaaaagcccaaggtaggggagtttcctctgctcacagttcttaccttcaaggcggatctgggcttccaccctcatgaacacagggattggggagggaccagagcgcccaatacacacagctccattatgcaatccattccagcaaattccccgtgtctgtggtcaccatttaggtgatcatacaggacaggctgcacatctcagtatatgtagggaccccaaatgaccacaacacagtacaattgccctttacctagggctaccatttcctagcaaaccaaacatagttcgagaacagctggcccaggagctaccactggctactcagaggaggctcattagctggctacatgcttcgcaggaagtgggaaggactcacatcataaaaaggaccatgtagctttttccctgaaagcttctcaccctccaccctctgccttgcaatacgcaaactgcgcctgctcctgaaaagctctctgggaaggaatgggcctggctttccgttcctggaggcggcgccttagattgggaggcctcattggccacttagagcgcagcctgagtttccaggccccttcctgggagaggctgttaacacgggggaggggcaggagagggatatggagagcaggtggtggaatcagaggacgaggctgctctaaagactgttctggccccagacacagggtagtctttgctagcagctcatttccgagttacttttcattttcaaatgccaaggcaagtgactagactcgcgctaatacagtgctggacaacacattcaccttttctgtgaacaggcagccttctaaaagccccaaacatccttcttgatgctttgggggctcaattattttatatccaacccagcatctttctagtccctatgctgtatgcttgaacttcggaaaatgcttttccccgcccaatcttctctcaaatataaacacatcacacagggtgttgggggtggggggggggggtggggggacttatccctggccttaggacacaggacaaatctattttggatagaaatgcctgaacagagacccttatttggaaaggtgaattaactttggtcacgacatggactgtcagacaaaatggcagtatcctaagagttaaggcacatcaaacacaggagtcgagagagtgcagttcagggaaaaaggagaggaggaaacagtgaggcagggagaaaggctttccaaataagagttcatgttggaaacttttgtcacggctttattgagattaagttcacatacaatttgtatccatttaaagtatacaatttgatgacttttggtatattcagagttgtgcaaccattatcactagatcaattttagaaagtttatcaccccaaagagaaatcctgcacccatcagccaacactccccaacccatcggccaccccaagccctctgcaaccacgaatcgactgtctctgtagattggccttctggacgttctacataaatgaaatcatatagtatgtggtagagggcctatttcccatgattccttcatatttgcatatacgatacaaggctgttagagagataattggaattaatttgactgtaaacacaaagatattagtacaaaatacgtgacgtagaaagtaataatttcttgggtagtttgcagttttaaaattatgttttaaaatggactatcatatgcttaccgtaacttgaaagtatttcgatttcttggctttatatatcttgtggaaaggacgaaacaccgctagaactactgcacgatccagggttttagagctagaaatagcaagttaaaataaggctagtccgttatcaacttgaaaaagtggcaccgagtcggtgcttttttttttccaggtttaccactcctaggtatttactcaaaggactctatacgtcaacctgtgacagaggcatcatatacaagcagggagtggtggcacctgcctttaatcccacccctcaggaggcagagtcaggtagatctctgtgagttcgaggccagtttggtctacatagtgagttctagtacagccataagaccatatagccatatggaggggggattgtgagcatagagtatgaatgttcttgagagaattattaaatgaattggaattattatacactgtcttctttcataggaaaaatgaacagaaagggagagatctttgggtggggctaacagcatacatgacatgaaagcagaaggggattagttattggaaggcagggagggacccaggaggatgaagggaagagaatgcaagggaaaggagtaaaggaggaggaggtagaggtacacactattaattccagcacttgtgaggaggggacagagctctgtgagttcaaggtcagccccctggatcgtgcagtagttctag

We claim:

1. A combination for integrating a coding sequence for a retinoschisin protein or functional fragment thereof into a target genomic locus in a retinal cell, wherein the combination comprises:
(a) a nucleic acid construct comprising the coding sequence for the retinoschisin protein or functional fragment thereof for integration into the target genomic locus, wherein the coding sequence encodes the protein encoded by exons 2-6 of human RS1,
wherein the nucleic acid construct does not comprise a promoter that drives expression of the retinoschisin protein or functional fragment thereof, and wherein:
(I) the nucleic acid construct comprises a polyadenylation signal sequence located 3′ of the coding sequence, and
(II) the nucleic acid construct comprises a splice acceptor site located 5′ of the coding sequence; and
(b) a nuclease agent comprising a Cas protein or a nucleic acid encoding the Cas protein and a guide RNA or a DNA encoding the guide RNA, wherein the nuclease agent targets a nuclease target sequence in the target genomic locus,
wherein the target genomic locus is in an endogenous RS1 locus comprising an endogenous RS1 gene,
wherein integration of the nucleic acid construct into the endogenous RS1 locus prevents transcription of the endogenous RS1 gene downstream of the integration site, and
wherein integration of the nucleic acid construct into the endogenous RS1 locus in the retinal cell reduces or eliminates expression of endogenous retinoschisin protein and replaces it with expression of the retinoschisin protein or functional fragment thereof encoded by the nucleic acid construct.

2. The combination of claim 1, wherein the splice acceptor site is from intron 1 of human RS1.

3. The combination of claim 1, wherein the nucleic acid construct comprises a fragment or portion of the first intron of human RS1 located 5′ of the coding sequence.

4. The combination of claim 1, wherein the nucleic acid construct is for homology-independent targeted integration into the target genomic locus, and wherein the nucleic acid construct comprises the coding sequence for the retinoschisin protein or functional fragment thereof flanked on each side by a nuclease target sequence for a nuclease agent.

5. The combination of claim 4, wherein:
(I) the nuclease target sequence in the target genomic locus is identical to the nuclease target sequence in the nucleic acid construct, and wherein the nuclease target sequence in the target genomic locus is destroyed if the nucleic acid construct is inserted into the target genomic locus in the correct orientation but is reformed if the nucleic acid construct is inserted into the target genomic locus in the opposite orientation; or
(II) the coding sequence for the retinoschisin protein or functional fragment thereof comprises complementary DNA (cDNA) that encodes the protein encoded by exons 2-6 of human RS1,
wherein the nuclease target sequence in the target genomic locus is identical to the nuclease target sequence in the nucleic acid construct, and wherein the nuclease target sequence in the target genomic locus is destroyed if the nucleic acid construct is inserted into the target genomic locus in the correct orientation but is reformed if the nucleic acid construct is inserted into the target genomic locus in the opposite orientation.

6. The combination of claim 1, wherein the nucleic acid construct is for homologous recombination with the target genomic locus, and wherein the nucleic acid construct comprises the coding sequence for the retinoschisin protein or functional fragment thereof flanked by homology arms on each side.

7. The combination of claim 6, wherein the coding sequence and homology arms are further flanked on each side by a nuclease target sequence for a nuclease agent.

8. The combination of claim 7, wherein each homology arm is between 25 nucleotides and 2.5 kb in length.

9. The combination of claim 6, wherein the retinoschisin protein or functional fragment thereof is a human retinoschisin protein or functional fragment thereof, the coding sequence for the retinoschisin protein or functional fragment thereof comprises complementary DNA (cDNA) that encodes the protein encoded by exons 2-6 of human RS1, and each homology arm is between 25 nucleotides and 2.5 kb in length.

10. The combination of claim 1, wherein the nucleic acid construct is bidirectional and comprises:
(a) a first segment comprising a first coding sequence for a first retinoschisin protein or functional fragment thereof, wherein the first coding sequence encodes the protein encoded by exons 2-6 of human RS1; and
(b) a second segment comprising a reverse complement of a second coding sequence for a second retinoschisin protein or functional fragment thereof, wherein the second coding sequence encodes the protein encoded by exons 2-6 of human RS1.

11. The combination of claim 10, wherein:
(I) the nucleic acid construct does not comprise a homology arm; or
(II) the first retinoschisin protein or functional fragment thereof is identical to the second retinoschisin protein or functional fragment thereof, and wherein the second coding sequence adopts a different codon usage from the codon usage of the first coding sequence; or
(III) the second segment is located 3′ of the first segment,
wherein both the first retinoschisin protein or functional fragment thereof and the second retinoschisin protein or functional fragment thereof are a human retinoschisin protein or functional fragment thereof,
wherein the first retinoschisin protein or functional fragment thereof is identical to the second retinoschisin protein or functional fragment thereof,
wherein both the first coding sequence and the second coding sequence comprise complementary DNA (cDNA) that encodes the protein encoded by exons 2-6 of human RS1,
wherein the second coding sequence adopts a different codon usage from the codon usage of the first coding sequence,
wherein the first segment comprises a first polyadenylation signal sequence located 3′ of the first coding sequence, and the second segment comprises a reverse complement of a second polyadenylation signal sequence located 5′ of the reverse complement of the second coding sequence,
wherein the first segment comprises a first splice acceptor site located 5′ of the first coding sequence, and the second segment comprises a reverse complement of a second splice acceptor site located 3′ of the reverse complement of the second coding sequence,
wherein the nucleic acid construct does not comprise a promoter that drives expression of the first retinoschisin protein or functional fragment thereof or the second retinoschisin protein or functional fragment thereof, and
wherein the nucleic acid construct does not comprise a homology arm.

12. The combination of claim 1, wherein the nuclease target sequence in the target genomic locus is in the first intron in the endogenous RS1 gene at the endogenous RS1 locus.

13. The combination of claim 1, wherein the nucleic acid construct is in a viral vector.

14. The combination of claim 13, wherein the viral vector is an adeno-associated virus (AAV) viral vector.

15. The combination of claim 1, wherein the Cas protein is a Cas9 protein.

16. The combination of claim 15, wherein:
(I) the combination comprises a DNA encoding the Cas protein, and wherein the combination comprises the DNA encoding the guide RNA; or
(II) the combination comprises a messenger RNA encoding the Cas protein, and wherein the combination comprises the guide RNA in the form of RNA.

17. The combination of claim 16, wherein the DNA encoding the Cas protein and the DNA encoding the guide RNA are in one or more viral vectors.

18. The combination of claim 16, wherein the guide RNA and the messenger RNA encoding the Cas protein are in a lipid nanoparticle.

19. The combination of claim 1, wherein the nucleic acid construct and the nuclease agent are in the same delivery vehicle.

20. The combination of claim 1, wherein the nucleic acid construct and the nuclease agent are in different delivery vehicles.
